(19) United States
(12) Patent Application Publication
(10) Pub. No.: US 2026/0130985 A1
(43) Pub. Date: May 14, 2026

(54) NUCLEIC ACID-BASED UNIVERSAL VACCINE AND METHODS OF USE THEREOF

(71) Applicant: ADVANCED RNA VACCINE (ARV) TECHNOLOGIES, INC., North Potomac, MD (US)

(72) Inventors: Huabin ZHU, Evans, GA (US); Yangiun QIN, Potomac, MD (US); Renhuan XU, North Potomac, MD (US)

(21) Appl. No.: 19/114,594

(22) PCT Filed: Sep. 25, 2023
(86) PCT No.: PCT/US2023/075052

§ 371 Date: Mar. 24, 2025

Related U.S. Application Data
(60) Provisional application No. 63/376,908, filed on Sep. 23, 2022.

(51) Int. Cl. A61K 39/215; A61K 39/00; A61K 39/275; A61P 31/14; C12N 15/11

(52) U.S. Cl. CPC A61K 39/215; A61K 39/275; A61P 31/14; C12N 15/11; A61K 2039/53; A61K 2039/54; A61K 2039/55555; A61K 2039/572; A61K 2039/575; A61K 2039/70; C12N 2710/16634; C12N 2710/24034; C12N 2770/20034

(57) ABSTRACT

Described herein are compositions including a nucleic acid sequence (e.g., mRNA) encoding an infection agent antigenic polypeptide and a nucleic acid sequence (e.g., mRNA) encoding at least one universal T-cell epitope (UTE), as well as compositions including a nucleic acid sequence (e.g., mRNA) encoding an infection agent antigenic polypeptide and at least one universal T-cell epitope, and methods for using the compositions.

### CROSS-REFERENCE TO RELATED APPLICATION

[0001] This application claims the benefit of U.S. Provisional Application No. 63/376,908, filed on Sep. 23, 2022, the contents of which is hereby incorporated in its entirety.

### REFERENCE TO A SEQUENCE LISTING

[0002] The Sequence Listing submitted Sep. 25, 2023 as a XML file named “11538-003WO1_Sequence_Listing.xml,” created on Sep. 22, 2022, and having a size of 1,353,272 bytes is hereby incorporated by reference pursuant to 37 C.F.R. § 1.834.

### BACKGROUND

[0003] Vaccine-induced neutralizing antibodies are considered the gold standard for preventing pathogens from entering or causing diseases. However, many pathogens have developed mechanisms to evade antibody protection, such as some RNA viruses (e.g., SARS-CoV-2), which frequently mutate viral structural proteins, resulting in diminished protective efficacy over time. Therefore, there is a need to develop a universal vaccine that ensures broad efficacy against multiple strains or different variants of one pathogen.

[0004] To date, the importance of T cell immunity in vaccination may have been relatively underestimated. T cells, particularly cytotoxic CD8 T cells, play a central role in the control of infections, including the prevention of severe COVID-19 and HSV-1/2-associated diseases. These cytotoxic T cells can kill any infected cell by recognizing foreign peptides presented on the cell surface bound to MHC class I molecules (MHC I). If the pathogen-derived peptides are selected from conserved regions of different strains or variants, then the activated T cells will be capable of providing a broad spectrum of protection. Thus, a vaccine platform capable of inducing sufficiently high-quality antibodies and memory T cells would greatly increase the efficacy of protection, especially against infections that cannot be effectively controlled by antibodies alone.

[0005] Accordingly, there is a need for a platform for generating universal vaccines.

### SUMMARY

[0006] Described herein are compositions, nanoparticles, and/or vaccines including a nucleic acid sequence for example, DNA or RNA (e.g., mRNA) encoding an infection agent antigenic polypeptide and a nucleic acid encoding at least one universal T-cell epitope, as well as, compositions, nanoparticles, and/or vaccines including a nucleic acid sequence encoding an infection agent antigenic polypeptide and at least one universal T-cell epitope. The universal T-cell epitopes (UTE) described herein are epitopes highly conserved across various strains/variants/serotypes of a virus. In some embodiments, the compositions, nanoparticles, and/or vaccines can further include pharmaceutically acceptable carriers.

[0007] In some embodiments, the compositions including a nucleic acid sequence (e.g., mRNA) encoding an infection agent antigenic polypeptide and a nucleic acid sequence encoding a universal T-cell epitope can elicit an antibody response in a subject. In some embodiments, the compositions including a nucleic acid sequence encoding the infection agent antigenic polypeptide and a nucleic acid sequence encoding a universal T-cell epitope can elicit both an antibody response and a T-cell response in a subject. In some embodiments, the compositions including a nucleic acid sequence encoding the infection agent antigenic polypeptide and a nucleic acid sequence encoding a universal T-cell epitope can elicit a broad T-cell response in a subject. A broad T-cell response as described herein refers to a T-cell response against at least one universal T-cell epitope in order for a composition or vaccine to protect against different variants of the same virus.

[0008] In some embodiments, the compositions including a nucleic acid sequence (e.g., mRNA) encoding the infection agent antigenic polypeptide and a universal T-cell epitope can elicit an antibody response in a subject. In some embodiments, the compositions including a nucleic acid sequence encoding the infection agent antigenic polypeptide and a universal T-cell epitope can elicit both an antibody response and a T-cell response in a subject. In some embodiments, the compositions including a nucleic acid sequence encoding the infection agent antigenic polypeptide and the universal T-cell epitopes can elicit a broad T-cell response in a subject. For example, in some embodiments, the nucleic acid sequence encoding an infection agent antigenic polypeptide and at least one universal T-cell epitope may be recognized by the immune system of a subject to elicit a CD4+ T cell response or/and CD8+ T cell response.

[0009] In some embodiments, the universal T-cell epitope(s) can provide greater protection against infection agent variants.

[0010] In some embodiments, the nucleic acid sequence can encode an infection agent antigenic polypeptide. In some embodiments, the infection agent can be a virus. For example, negative-sense, single-stranded RNA virus of the family Paramyxoviridae such as human Metapneumovirus (hMPV), parainfluenza viruses (PIV), respiratory syncytial virus (RSV), measles virus (MeV), varicella-zoster, influenza virus (e.g., influenza A and B), herpes simplex virus 1 (HSV1), herpes simplex virus 2 (HSV2), poxvirus (e.g., smallpox, monkeypox), HIV, cytomegalovirus, Epstein-Barr virus, rotavirus, rhinovirus, adenovirus, papillomavirus, poliovirus, mumps, rabies, rubella, coxsackieviruses, equine encephalitis, Japanese encephalitis, yellow fever, Rift Valley fever, hepatitis A, B, C, D, and E virus, coronaviruses (e.g., MERS-COV, SARS-COV, SARS-COV2, HCoV-OC43. HCOV-229E, HCOV-NL63, HCOV-NL, HCOV-NH, HCOV-HKU1), African swine fever (ASF), foot-and-mouth disease virus (FMDV), feline herpesvirus-1/feline viral rhinotracheitis, canine distemper, feline coronavirus (FCOV) or any combination thereof. In some embodiments, the infection agent can be monkeypox, herpes simplex virus 1 (HSV1), herpes simplex virus 2 (HSV2), SARS-COV-2, or any combination thereof.

[0011] Described herein are methods of treating, inhibiting, reducing, ameliorating, and/or preventing a viral infection caused by an infection agent in a subject comprising administering to the subject a composition described herein, a nanoparticle described herein, or a vaccine described herein.

[0012] In some embodiments, also described are methods of activating T cells, B cells, or any combination thereof, stimulating the proliferation of T cells, B cells, or any combination thereof, eliciting an immune response in a subject to an infection agent, and/or enhancing an immune response generated by a nucleic acid-based vaccine including introducing a nucleic acid sequence encoding at least one universal T-cell epitope into the nucleic acid-based vaccine. In some embodiments, the methods can include administering to the subject a composition described herein, a nanoparticle described herein, or a vaccine described herein.

[0013] In some embodiments, the nucleic acid can include DNA, RNA, any combination thereof (e.g., plasmid DNA, minicircle DNA, minimalistic, immunologically defined gene expression (MIDGE) and Doggybone, messenger RNA (mRNA), circle (cirRNA), self-amplifying-RNA (saRNA, also refer as SAM), or DNA launched SAM (DLSAM)). The nucleic acid can encode a bicistronic or multi-cistronic construct, for example, a DNA comprising at least two antigens.

[0014] In some embodiments, the subject can be a human. In some embodiments, the subject can be non-human vertebrate.

### BRIEF DESCRIPTION OF THE DRAWINGS

[0015] The accompanying figures, which are incorporated in and constitute a part of this specification, illustrate several aspects described below.

[0016] FIGS. 1A-1H Designation and validation of PanCoVAX mRNA. (1A) scheme of PanCoVAX mRNAs. (1B) IVT mRNA of DVS, OVS and MTE. (1C-1G) expression level of mRNA DVS and OVS in 293T cells are determined by Western blot (1C) Flow Cytometry (1D-1E) DVS (1D) and OVS (1E) and Immunostaining (1F-1G) DVS (1F) and OVS (1G). (1H) expression level of mRNA MTE in 293 T cells.

[0017] FIGS. 2A-2C Physiochemical characterization of lipid nanoparticle formulation. (2A) Size and polydispersity index (PDI) of ARV-L002 (“ARV-T1”) and ARV-L001 (“SM102”) LNP formulations with DVS or DVS/MTE. (2B) Surface charge (zeta potential) and mRNA encapsulation efficiency of ARV-L001 and ARV-L002 LNP formulation with DVS or DVS/MTE. (2C) Western blot analysis showing in vitro expression of spike protein after transfecting cells with 2.5 ug mRNA over time in 293 T cells.

[0018] FIGS. 3A-3F ELISA and pseudovirus neutralization assay. (3A) immunization scheme: BALB/c mice were immunized at week 0 and 3. Serum samples were collected on day 14 and 35 post primary immunization. Convalescent serum derived from COVID positive human serum was used as control. Spike specific antibody response total IgG (3B) and (3C) and neutralizing antibodies (3D-3F) delta pseudovirus (3D), omicron pseudovirus (3E) and omicron-BA2 pseudovirus (3F) were evaluated with serum by ELISA and pseudovirus neutralization assay.

[0019] FIGS. 4A-4D T cell response detection by Elispot assay. ELISPOT as described in the M&M, 3×10⁵ splenocytes were used to measure the Ag-specific T cell response upon stimulation of Spike (4A, 4B) and MTE (4C, 4D) overlapping peptides (synthesized by Genscript and JPT, respectively) at 1 μg/ml.

[0020] FIGS. 5A-5C Dosing study. BALB/c mice were immunized twice at week 0 and 3 with 0.01 ug, 0.lug and 1 μg mRNA formulated with either SM102 or ARV-T1 LNP. Serum samples were collected on day 14 (5A) and 35 (5B) post primary immunization. Spike specific antibody response total IgG (5A and 5B) and neutralizing antibodies (5C) on day 35 were evaluated with serum by ELISA and pseudovirus neutralization assay.

[0021] FIGS. 6A-6C. mRNA encoding MTE, OVS or MTE/OVS efficiently protected hACE2 transgenic mice from SARS-COV-2 Delta variant infection. (6A) scheme of immunization and challenge schedule, hACE-transgenic mice (K18) were immunized twice with ARV TI formulated LNP containing mRNA of MTE, OVS and MTE/OVS, 14 days after the last immunization, mice were infected with a lethal dose of SARS-COV-2 Delta Variant. (6B) and (6C), after infection, the animal body weight (6B) and survival (6C) were observed on daily basis. (6D) virus titers were determined by qRT-PCR from lungs at 4 days post-infection.

[0022] FIGS. 7A-7E T-cell response detection by intracellular staining. Splenocytes were isolated and stimulated with different peptides pool of spike or MTE, After 6h, intracellular cytokine staining was performed and analyzed by flow cytometry (7A). (7B) Spike-specific CD4 T cell response. (7C) Spike-specific CD8 T cell response. (7D) MTE-specific CD4 T cell response. (7E) MTE-specific CD8 T cell response.

[0023] FIGS. 8A-8F show in vitro transfection efficiency of GFP mRNA (1 μg/mL) using LNP deliver into BHK cells after 24 hours. (8A) Representative fluorescent images of BHK cells after transfection. (8B) Transfection efficacy analysis of GFP expression using flow cytometer. MFI denotes Mean Fluorescent Intensity. (8C-8F) Characterization of LNP (T1)-mRNA GFP, (8C) size and PDI. (8D) S potential and encapsulation efficacy, (8E) CryoEM LNP image, (8F) LNP size based on CryoEM image. FIG. 9 Biodistribution and delivered cell type of LNP (T1) in vivo. (9A) shows in vivo transfection efficiency of luciferase-expressing mRNA in vivo. LNPs were formulated with indicated ionizable lipids and 1 μg of formulated Luciferase-expressing mRNA were injected intramuscularly. After administration, the luciferase expression was determined by whole body bioluminescence imaging using an IVIS Spectrum in vivo imaging system at 6, 24, 48, and 72 hours, respectively. (9B) Biodistribution of LNP (T1)-mRNA luciferase in vivo. (9C-9D), delivery cell type of LNP (T1)-mRNA Cre in Ai14 mice by I.M. and I.V.

[0024] FIG. 10 Antigen-specific T cell responses were evaluated by Elispot. Data were presented as Mean±SD. Statistical comparisons were analyzed using by one-way ANOVA with Tukey's multiple comparison test. *p<0.05, **p<0.01.

[0025] FIG. 11 Synthetizations of HSV mRNA vaccine in vitro. HSV gB, gD, gH, gL, UL19, and MTE mRNAs were synthesized with T7 RNA polymerase in vitro transcription and run on 0.8% MOPS agarose gel.

[0026] FIGS. 12A-12F validation of HSV mRNA vaccine in vitro. (12A-12C) HSV mRNA gB (12A), gD (12B) and gL (12C) were transfected into 293T cells with mRNA transfection kit and detected by western blot. (12D) HSV mRNA MTE-His was transfected into 293T cells with mRNA transfection kit. After 48h, MTE-His protein were concentrated from cell lysis and detected by western blot. (12E-12F) HSV mRNA gH-HA (12E) and UL-19 (12F) were transfected into 293T cells with mRNA transfection kit and detected by flow cytometry.

[0027] FIGS. 13A-13B Physiochemical characterization of lipid nanoparticle formulation. (13A) Size and polydispersity index (PDI) of LNP formulations with indicated mRNA using ARV-L002 (ARV-T1). (13B) encapsulation efficiency of mRNA vaccine of ARV-L002 LNP formulation with indicated mRNA.

[0028] FIGS. 14A-14G HSV mRNA vaccine elicits robust T cell responses and strong antibody responses in BALB/c mice. (14A) BALB/c mice were intramuscularly immunized on D0, D21, and D42 with 5 μg of LNP formulated mRNA vaccines (gD-wt, gD, gB/gD, gB/gD+gH/gL and gH/gL+MTE/UL19). Mouse serum were collected on D14, D35, and D56, respectively. Mouse spleens were collected on D56. (14B) gD specific IgG were detected by ELISA from serum samples. (14C) Neutralization assays were performed with HSV-2 MS strain in Vero cells by counting plaque. (14D-14G) Splenocytes were isolated from mouse spleen and performed for ELISPOT assay (14D-14E) or flow cytometry intracellular staining (14F-14G) with stimulation of a UL-19 peptides pool (14E-14F) or gD peptides pool (14D and 14G).

[0029] FIGS. 15A-15D HSV mRNA vaccines protect mice from HSV-2 challenge. (15A-15C) 50% lethal dose (LD50) of HSV2 MS in BALB/c. (15A) Female BALB/c mice were injected with 2 mg medroxyprogesterone on D-7 and -3 and challenged intravaginally with different PFU of HSV-2. Mouse body weight and survival were recorded after the challenge. (15B) Mouse survival curve after challenge. (15C) The value of LD50 of HSV-2 MS strain in BALB/c mice. (15D), Female BALB/c mice were intramuscularly immunized on D0, D21 with 5 μg of LNP formulated mRNA vaccines (gB/gD, gB/gD+MTE/UL19, gB/gD+gH/gL+MTE/UL19 and gB/gD+gH/gL+gC/gE+MTE/UL19). Mouse serum samples were collected on D14, D28. Mice were injected with 2 mg medroxyprogesterone on D35 and 39 and challenged intravaginally with 10+PFU HSV2 MS strain or HSV-1 HF on D42. Vaginal cultures were collected on D44 and 46 to determine the copy number of HSV2 or HSV-1. Mouse genital disease, body weight and survival were recorded until to D56.

[0030] FIG. 16A Synthetization and formulation of FIPV mRNA vaccine in. Linearization of DNA plasmids with BspQI before in vitro transcription. 1, 2 indicated before and after digestion respectively.

[0031] FIGS. 17A-17B Validation of FIPV mRNA vaccine in vitro. (17A) FIPV Spike mRNAs (Fcov-I-S-2P-HA, Fcov-I-S-4P-HA and Fcov-I-S-2P2Cb-HA) were synthesized with T7 RNA polymerase in vitro transcription and run on 0.8% MOPS agarose gel. (17B) FIPV Spike mRNAs were transfected into 293T cells with mRNA transfection kit and detected by western blot.

[0032] FIGS. 18A-18C mRNA with human derived UTR can be efficiently expressed in feline cells. eGFP mRNAs franking with human derived UTRs were transfected into feline cell line FCWF-4cu and human cell line 293T cells with mRNA transfection kit. The expression levels of eGFP were detected by Flow cytometry (18A-18B) and fluorescence microscope (18C).

[0033] FIGS. 19A-19B Production of Fcov-I SI antigen and antibody. (19A) Recombinant Fcov-I S1 subunit His tag protein was produced in vitro and detected with His antibody. (19B) Rabbits were immunized 4 doses with mRNA formulated with ARV-T1 LNP expressing FCov-I full length S protein. Serum samples were collected 3 weeks after immunizations and performed ELISA assay for S1 antibody titers with recombinant Fcov-I S1-His protein.

[0034] FIGS. 20A-20D FIPV mRNA vaccine elicits robust T cell responses and strong antibody responses in BALB/c mice. (20A) BALB/c mice were intramuscularly immunized on DO and D21 with 2 μg of LNP formulated mRNA vaccines (Fcov-I-S-wt, Fcov-I-S-2P, Fcov-I-S-2P2Cb, Fcov-I-S-4P and Fcov-II-RBD-MN). Mouse serum samples were collected on D14 and D35. Mouse spleens were collected on D35. (20B) SI specific IgG were detected by ELISA from serum samples. (20C-20D) Splenocytes were isolated from mouse spleens and performed for ELISPOT assay with stimulation of a S1 protein (20C) or N peptides pool (20D).

[0035] FIG. 21 FIPV mRNA vaccine protects cat from Fcov-I and Fcov-II challenge. Cats were intramuscularly immunized on DO and D21 with 10 ug of LNP formulated mRNA vaccines (Fcov-I-S-2P, Fcov-II-RBD-MN and Fcov-I-S-2P/Fcov-II-RBD-MN). Cat sera were collected on D14 and D28. Cats were challenged with Fcov-I and Fcov-II virus on D35. Cats body weight and survival were recorded until D49.

### DETAILED DESCRIPTION

[0036] The present disclosure provides compositions including a nucleic acid sequence, for example an mRNA, encoding an infection agent antigenic polypeptide and a nucleic acid sequence encoding at least one universal T-cell epitope (UTE), as well as, compositions including a nucleic acid sequence encoding an infection agent antigenic polypeptide and at least one T-cell epitope. In some embodiments, the composition can be a nanoparticle (e.g., lipid nanoparticle), or a vaccine. The present disclosure also provides methods of using the compositions for delivering a nucleic acid sequence (e.g., mRNA) described herein to a subject.

[0037] Reference will now be made in detail to the embodiments of the invention, examples of which are illustrated in the drawings and the examples. This invention may, however, be embodied in many different forms and should not be construed as limited to the embodiments set forth herein.

[0038] Unless defined otherwise, all technical and scientific terms used herein have the same meaning as commonly understood to one of ordinary skill in the art to which this invention belongs. The following definitions are provided for the full understanding of terms used in this specification.

### Definitions

### General Definitions

[0039] As used in this specification and the following claims, the terms “comprise” (as well as forms, derivatives, or variations thereof, such as “comprising” and “comprises”) and “include” (as well as forms, derivatives, or variations thereof, such as “including” and “includes”) are inclusive (i.e., open-ended) and do not exclude additional elements or steps. For example, the terms “comprise” and/or “comprising,” when used in this specification, specify the presence of stated features, integers, steps, operations, elements, and/or components, but do not preclude the presence or addition of one or more other features, integers, steps, operations, elements, components, and/or groups thereof. Other than where noted, all numbers expressing quantities of ingredients, reaction conditions, geometries, dimensions, and so forth used in the specification and claims are to be understood at the very least, and not as an attempt to limit the application of the doctrine of equivalents to the scope of the claims, to be construed in light of the number of significant digits and ordinary rounding approaches.

[0040] Accordingly, these terms are intended to not only cover the recited element(s) or step(s), but may also include other elements or steps not expressly recited. Furthermore, as used herein, the use of the terms “a”, “an”, and “the” when used in conjunction with an element may mean “one,” but it is also consistent with the meaning of “one or more,” “at least one,” and “one or more than one.” Therefore, an element preceded by “a” or “an” does not, without more constraints, preclude the existence of additional identical elements.

[0041] Ranges can be expressed herein as from “about” one particular value, and/or to “about” another particular value. By “about” is meant within 5% of the value, e.g., within 4, 3, 2, or 1% of the value. When such a range is expressed, another aspect includes from the one particular value and/or to the other particular value. Similarly, when values are expressed as approximations, by use of the antecedent “about,” it will be understood that the particular value forms another aspect. It will be further understood that the endpoints of each of the ranges are significant both in relation to the other endpoint, and independently of the other endpoint. It is also understood that there are a number of values disclosed herein, and that each value is also herein disclosed as “about” that particular value in addition to the value itself. For example, if the value “10” is disclosed, then “about 10” is also disclosed. A range may be construed to include the start and the end of the range. For example, a range of 10% to 20% (i.e., range of 10%-20%) can includes 10% and also includes 20%, and includes percentages in between 10% and 20%, unless explicitly stated otherwise herein.

[0042] As used herein, the terms “may,” “optionally,” and “may optionally” are used interchangeably and are meant to include cases in which the condition occurs as well as cases in which the condition does not occur. Thus, for example, the statement that a formulation “may include an excipient” is meant to include cases in which the formulation includes an excipient as well as cases in which the formulation does not include an excipient.

[0043] It is understood that when combinations, subsets, groups, etc. of elements are disclosed (e.g., combinations of components in a composition, or combinations of steps in a method), that while specific reference of each of the various individual and collective combinations and permutations of these elements may not be explicitly disclosed, each is specifically contemplated and described herein.

[0044] “Administration” to a subject includes any route of introducing or delivering to a subject an agent. Administration can be carried out by any suitable route, including oral, topical, transcutaneous, transdermal, intra-joint, intra-arteriole, intradermal, intraventricular, intralesional, intranasal, rectal, vaginal, by inhalation, via an implanted reservoir, parenteral (e.g., subcutaneous, intravenous, intramuscular, intra-articular, intra-synovial, intrasternal, intrathecal, intraperitoneal, intrahepatic, intralesional, and intracranial injections or infusion techniques), and the like. “Concurrent administration”, “administration in combination”, “simultaneous administration” or “administered simultaneously” as used herein, means that the compounds are administered at the same point in time or essentially immediately following one another. In the latter case, the two compounds are administered at times sufficiently close that the results observed are indistinguishable from those achieved when the compounds are administered at the same point in time. “Systemic administration” refers to the introducing or delivering to a subject an agent via a route which introduces or delivers the agent to extensive areas of the subject's body (e.g. greater than 50% of the body), for example through entrance into the circulatory or lymph systems. By contrast, “local administration” refers to the introducing or delivery to a subject an agent via a route which introduces or delivers the agent to the area or area immediately adjacent to the point of administration and does not introduce the agent systemically in a therapeutically significant amount. For example, locally administered agents are easily detectable in the local vicinity of the point of administration but are undetectable or detectable at negligible amounts in distal parts of the subject's body. Administration includes self-administration and the administration by another.

[0045] As used herein, the term “controlled-release” or “controlled-release drug delivery” or “extended release” refers to release or administration of a drug from a given dosage form in a controlled fashion in order to achieve the desired pharmacokinetic profile in vivo. An aspect of “controlled” drug delivery is the ability to manipulate the formulation and/or dosage form in order to establish the desired kinetics of drug release.

[0046] A “decrease” can refer to any change that results in a smaller amount of a symptom, disease, composition, condition, or activity. A substance is also understood to decrease the genetic output of a gene when the genetic output of the gene product with the substance is less relative to the output of the gene product without the substance. Also, for example, a decrease can be a change in the symptoms of a disorder such that the symptoms are less than previously observed. A decrease can be any individual, median, or average decrease in a condition, symptom, activity, composition in a statistically significant amount. Thus, the decrease can be a 1, 2, 3, 4, 5, 6, 7, 8, 9, 10, 15, 20, 25, 30, 35, 40, 45, 50, 55, 60, 65, 70, 75, 80, 85, 90, 95, or 100% decrease so long as the decrease is statistically significant.

[0047] “Inhibit,” “inhibiting,” and “inhibition” mean to decrease an activity, response, condition, disease, or other biological parameter. This can include but is not limited to the complete ablation of the activity, response, condition, or disease. This may also include, for example, a 10% reduction in the activity, response, condition, or disease as compared to the native or control level. Thus, the reduction can be a 10, 20, 30, 40, 50, 60, 70, 80, 90, 100%, or any amount of reduction in between as compared to native or control levels.

[0048] “Inactivate”, “inactivating” and “inactivation” means to decrease or eliminate an activity, response, condition, disease, or other biological parameter due to a chemical (covalent bond formation) between the ligand and a its biological target.

[0049] By “reduce” or other forms of the word, such as “reducing” or “reduction,” is meant lowering of an event or characteristic (e.g., tumor growth). It is understood that this is typically in relation to some standard or expected value, in other words it is relative, but that it is not always necessary for the standard or relative value to be referred to. For example, “reduces tumor growth” means reducing the rate of growth of a tumor relative to a standard or a control.

[0050] As used herein, the terms “treating” or “treatment” of a subject includes the administration of a drug to a subject with the purpose of preventing, curing, healing, alleviating, relieving, altering, remedying, ameliorating, improving, stabilizing or affecting a disease or disorder, or a symptom of a disease or disorder. The terms “treating” and “treatment” can also refer to reduction in severity and/or frequency of symptoms, elimination of symptoms and/or underlying cause, prevention of the occurrence of symptoms and/or their underlying cause, and improvement or remediation of damage.

[0051] By “prevent” or other forms of the word, such as “preventing” or “prevention,” is meant to stop a particular event or characteristic, to stabilize or delay the development or progression of a particular event or characteristic, or to minimize the chances that a particular event or characteristic will occur. Prevent does not require comparison to a control as it is typically more absolute than, for example, reduce. As used herein, something could be reduced but not prevented, but something that is reduced could also be prevented. Likewise, something could be prevented but not reduced, but something that is prevented could also be reduced. It is understood that where reduce or prevent are used, unless specifically indicated otherwise, the use of the other word is also expressly disclosed. For example, the terms “prevent” or “suppress” can refer to a treatment that forestalls or slows the onset of a disease or condition or reduced the severity of the disease or condition. Thus, if a treatment can treat a disease in a subject having symptoms of the disease, it can also prevent or suppress that disease in a subject who has yet to suffer some or all of the symptoms. As used herein, the term “preventing” a disorder or unwanted physiological event in a subject refers specifically to the prevention of the occurrence of symptoms and/or their underlying cause, wherein the subject may or may not exhibit heightened susceptibility to the disorder or event.

[0052] By the term “effective amount” of a therapeutic agent is meant a nontoxic but sufficient amount of a beneficial agent to provide the desired effect. The amount of beneficial agent that is “effective” will vary from subject to subject, depending on the age and general condition of the subject, the particular beneficial agent or agents, and the like. Thus, it is not always possible to specify an exact “effective amount”. However, an appropriate “effective” amount in any subject case may be determined by one of ordinary skill in the art using routine experimentation. Also, as used herein, and unless specifically stated otherwise, an “effective amount” of a beneficial can also refer to an amount covering both therapeutically effective amounts and prophylactically effective amounts.

[0053] An “effective amount” of a drug necessary to achieve a therapeutic effect may vary according to factors such as the age, sex, and weight of the subject. Dosage regimens can be adjusted to provide the optimum therapeutic response. For example, several divided doses may be administered daily or the dose may be proportionally reduced as indicated by the exigencies of the therapeutic situation.

[0054] As used herein, a “therapeutically effective amount” of a therapeutic agent refers to an amount that is effective to achieve a desired therapeutic result, and a “prophylactically effective amount” of a therapeutic agent refers to an amount that is effective to prevent an unwanted physiological condition. Therapeutically effective and prophylactically effective amounts of a given therapeutic agent will typically vary with respect to factors such as the type and severity of the disorder or disease being treated and the age, gender, and weight of the subject. The term “therapeutically effective amount” can also refer to an amount of a therapeutic agent, or a rate of delivery of a therapeutic agent (e.g., amount over time), effective to facilitate a desired therapeutic effect. The precise desired therapeutic effect will vary according to the condition to be treated, the tolerance of the subject, the drug and/or drug formulation to be administered (e.g., the potency of the therapeutic agent (drug), the concentration of drug in the formulation, and the like), and a variety of other factors that are appreciated by those of ordinary skill in the art.

[0055] As used herein, the term “pharmaceutically acceptable” component can refer to a component that is not biologically or otherwise undesirable, i.e., the component may be incorporated into a pharmaceutical formulation of the invention and administered to a subject as described herein without causing any significant undesirable biological effects or interacting in a deleterious manner with any of the other components of the formulation in which it is contained. When the term “pharmaceutically acceptable” is used to refer to an excipient, it is generally implied that the component has met the required standards of toxicological and manufacturing testing or that it is included on the Inactive Ingredient Guide prepared by the U.S. Food and Drug Administration.

[0056] “Pharmaceutically acceptable carrier” (sometimes referred to as a “carrier”) means a carrier or excipient that is useful in preparing a pharmaceutical or therapeutic composition that is generally safe and non-toxic and includes a carrier that is acceptable for veterinary and/or human pharmaceutical or therapeutic use. The terms “carrier” or “pharmaceutically acceptable carrier” can include, but are not limited to, phosphate buffered saline solution, water, emulsions (such as an oil/water or water/oil emulsion) and/or various types of wetting agents. As used herein, the term “carrier” encompasses, but is not limited to, any excipient, diluent, filler, salt, buffer, stabilizer, solubilizer, lipid, stabilizer, or other material well known in the art for use in pharmaceutical formulations and as described further herein.

[0057] As used herein, “pharmaceutically acceptable salt” is a derivative of the disclosed compound in which the parent compound is modified by making inorganic and organic, non-toxic, acid or base addition salts thereof. The salts of the present compounds can be synthesized from a parent compound that contains a basic or acidic moiety by conventional chemical methods. Generally, such salts can be prepared by reacting free acid forms of these compounds with a stoichiometric amount of the appropriate base (such as Na, Ca, Mg, or K hydroxide, carbonate, bicarbonate, or the like), or by reacting free base forms of these compounds with a stoichiometric amount of the appropriate acid. Such reactions are typically carried out in water or in an organic solvent, or in a mixture of the two. Generally, non-aqueous media like ether, ethyl acetate, ethanol, isopropanol, or acetonitrile are typical, where practicable. Salts of the present compounds further include solvates of the compounds and of the compound salts.

[0058] Examples of pharmaceutically acceptable salts include, but are not limited to, mineral or organic acid salts of basic residues such as amines; alkali or organic salts of acidic residues such as carboxylic acids; and the like. The pharmaceutically acceptable salts include the conventional non-toxic salts and the quaternary ammonium salts of the parent compound formed, for example, from non-toxic inorganic or organic acids. For example, conventional non-toxic acid salts include those derived from inorganic acids such as hydrochloric, hydrobromic, sulfuric, sulfamic, phosphoric, nitric and the like; and the salts prepared from organic acids such as acetic, propionic, succinic, glycolic, stearic, lactic, malic, tartaric, citric, ascorbic, pamoic, maleic, hydroxymaleic, phenylacetic, glutamic, benzoic, salicylic, mesylic, esylic, besylic, sulfanilic, 2-acetoxybenzoic, fumaric, toluenesulfonic, methanesulfonic, ethane disulfonic, oxalic, isethionic, HOOC—(CH₂)ₙ-COOH where n is 0-4, and the like, or using a different acid that produces the same counterion. Lists of additional suitable salts may be found, e.g., in Remington's Pharmaceutical Sciences, 17th ed., Mack Publishing Company, Easton, Pa., p. 1418 (1985).

[0059] Also, as used herein, the term “pharmacologically active” (or simply “active”), as in a “pharmacologically active” derivative or analog, can refer to a derivative or analog (e.g., a salt, ester, amide, conjugate, metabolite, isomer, fragment, etc.) having the same type of pharmacological activity as the parent compound and approximately equivalent in degree.

[0060] A “control” is an alternative subject or sample used in an experiment for comparison purposes. A control can be “positive” or “negative.”

[0061] As used herein, by a “subject” is meant an individual. Thus, the “subject” can include domesticated animals (e.g., cats, dogs, etc.), livestock (e.g., cattle, horses, pigs, sheep, goats, etc.), laboratory animals (e.g., mouse, rabbit, rat, guinea pig, etc.), and birds. “Subject” can also include a mammal, such as a primate or a human. Thus, the subject can be a human or veterinary patient. The term “patient” refers to a subject under the treatment of a clinician, e.g., physician. Administration of the therapeutic agents can be carried out at dosages and for periods of time effective for treatment of a subject. In some embodiments, the subject is a human.

[0062] The term “nucleic acid” as used herein means a polymer composed of nucleotides, e.g. deoxyribonucleotides or ribonucleotides.

[0063] The terms “ribonucleic acid” and “RNA” as used herein mean a polymer composed of ribonucleotides.

[0064] The terms “deoxyribonucleic acid” and “DNA” as used herein mean a polymer composed of deoxyribonucleotides.

[0065] The term “oligonucleotide” denotes single- or double-stranded nucleotide multimers of from about 2 to up to about 100 nucleotides in length. Suitable oligonucleotides may be prepared by the phosphoramidite method described by Beaucage and Carruthers, Tetrahedron Lett., 22:1859-1862 (1981), or by the triester method according to Matteucci, et al., J. Am. Chem. Soc., 103:3185 (1981), both incorporated herein by reference, or by other chemical methods using either a commercial automated oligonucleotide synthesizer or VLSIPS™ technology. When oligonucleotides are referred to as “double-stranded,” it is understood by those of skill in the art that a pair of oligonucleotides exist in a hydrogen-bonded, helical array typically associated with, for example, DNA. In addition to the 100% complementary form of double-stranded oligonucleotides, the term “double-stranded,” as used herein is also meant to refer to those forms which include such structural features as bulges and loops, described more fully in such biochemistry texts as Stryer, Biochemistry, Third Ed., (1988), incorporated herein by reference for all purposes.

[0066] The term “polynucleotide” refers to a single or double stranded polymer composed of nucleotide monomers. In some embodiments, the polynucleotide is composed of nucleotide monomers of generally greater than 100 nucleotides in length and up to about 8,000 or more nucleotides in length.

[0067] Nucleic acids may be or may include, for example, ribonucleic acids (RNAs), deoxyribonucleic acids (DNAs), threose nucleic acids (TNAs), glycol nucleic acids (GNAs), peptide nucleic acids (PNAs), locked nucleic acids (LNAs, including LNA having a-D-ribo configuration, a-LNA having an a-L-ribo configuration (a diastereomer of LNA), 2′-amino-LNA having a 2′-amino functionalization, and 2′-amino-α-LNA having a 2′-amino functionalization), ethylene nucleic acids (ENA), cyclohexenyl nucleic acids (CeNA) or chimeras or combinations thereof.

[0068] In some embodiments, polynucleotides of the present disclosure function as messenger RNA (mRNA). “Messenger RNA” (mRNA) refers to any polynucleotide that encodes a (at least one) polypeptide (a naturally-occurring, non-naturally-occurring, or modified polymer of amino acids) and can be translated to produce the encoded polypeptide in vitro, in vivo, in situ or ex vivo. The skilled artisan will appreciate that, except where otherwise noted, polynucleotide sequences set forth in the instant application will recite “T”'s in a representative DNA sequence but where the sequence represents RNA (e.g., mRNA), the “T”s would be substituted for “U”s. Thus, any of the RNA polynucleotides encoded by a DNA identified by a particular sequence identification number may also comprise the corresponding RNA (e.g., mRNA) sequence encoded by the DNA, where each “T” of the DNA sequence is substituted with “U.”

[0069] The basic components of an mRNA molecule typically include at least one coding region, a 5′ untranslated region (UTR), a 3′ UTR, a 5′ cap and a poly-A tail. Polynucleotides of the present disclosure may function as mRNA but can be distinguished from wild-type mRNA in their functional and/or structural design features, which serve to overcome existing problems of effective polypeptide expression using nucleic-acid based therapeutics.

[0070] In some embodiments, a RNA polynucleotide an of RNA (e.g., mRNA) vaccine encodes 2-10, 2-9, 2-8, 2-7, 2-6, 2-5, 2-4, 2-3, 3-10, 3-9, 3-8, 3-7, 3-6, 3-5, 3-4, 4-10, 4-9, 4-8, 4-7, 4-6, 4-5, 5-10, 5-9, 5-8, 5-7, 5-6, 6-10, 6-9, 6-8, 6-7, 7-10, 7-9, 7-8, 8-10, 8-9 or 9-10 antigenic polypeptides. In some embodiments, a nucleic acid sequence (e.g., mRNA) encodes at least 10, 20, 30, 40, 50, 60, 70, 80, 90 or 100 antigenic polypeptides. In some embodiments, a nucleic acid sequence (e.g., mRNA) encodes at least 100 or at least 200 antigenic polypeptides. In some embodiments, a RNA polynucleotide of an encodes 1-10, 5-15, 10-20, 15-25, 20-30, 25-35, 30-40, 35-45, 40-50, 1-50, 1-100, 2-50 or 2-100 antigenic polypeptides.

[0071] Polynucleotides of the present disclosure, in some embodiments, are codon optimized. Codon optimization methods are known in the art and may be used as provided herein. Codon optimization, in some embodiments, may be used to match codon frequencies in target and host organisms to ensure proper folding; bias GC content to increase mRNA stability or reduce secondary structures; minimize tandem repeat codons or base runs that may impair gene construction or expression; customize transcriptional and translational control regions; insert or remove protein trafficking sequences; remove/add post translation modification sites in encoded protein (e.g. glycosylation sites); add, remove or shuffle protein domains; insert or delete restriction sites; modify ribosome binding sites and mRNA degradation sites; adjust translational rates to allow the various domains of the protein to fold properly; or to reduce or eliminate problem secondary structures within the polynucleotide. Codon optimization tools, algorithms and services are known in the art-non-limiting examples include services from GeneArt (Life Technologies), DNA2.0 (Menlo Park Calif.) and/or proprietary methods. In some embodiments, the open reading frame (ORF) sequence is optimized using optimization algorithms.

[0072] In some embodiments, a codon optimized sequence shares less than 95% sequence identity, less than 90% sequence identity, less than 85% sequence identity, less than 80% sequence identity, or less than 75% sequence identity to a naturally-occurring or wild-type sequence (e.g., a naturally-occurring or wild-type mRNA sequence encoding a polypeptide or protein of interest (e.g., an antigenic protein or antigenic polypeptide)).

[0073] In some embodiments, a codon-optimized sequence shares between 65% and 85% (e.g., between about 67% and about 85%, or between about 67% and about 80%) sequence identity to a naturally-occurring sequence or a wild-type sequence (e.g., a naturally-occurring or wild-type mRNA sequence encoding a polypeptide or protein of interest (e.g., an antigenic protein or polypeptide)). In some embodiments, a codon-optimized sequence shares between 65% and 75%, or about 80% sequence identity to a naturally-occurring sequence or wild-type sequence (e.g., a naturally-occurring or wild-type mRNA sequence encoding a polypeptide or protein of interest (e.g., an antigenic protein or polypeptide)).

[0074] In some embodiments a codon-optimized RNA (e.g., mRNA) may, for instance, be one in which the levels of G/C are enhanced. The G/C-content of nucleic acid molecules may influence the stability of the RNA. RNA having an increased amount of guanine (G) and/or cytosine (C) residues may be functionally more stable than nucleic acids containing a large amount of adenine (A) and thymine (T) or uracil (U) nucleotides. WO02/098443 discloses a pharmaceutical composition containing an mRNA stabilized by sequence modifications in the translated region. Due to the degeneracy of the genetic code, the modifications work by substituting existing codons for those that promote greater RNA stability without changing the resulting amino acid. The approach is limited to coding regions of the RNA.

[0075] The term “polypeptide” refers to a compound made up of a single chain of D- or L-amino acids or a mixture of D- and L-amino acids joined by peptide bonds.

[0076] In some embodiments, a polypeptide is longer than 25 amino acids and shorter than 50 amino acids. The term “antigenic polypeptide” includes full length polypeptides/proteins as well as immunogenic fragments thereof (immunogenic fragments capable of inducing an immune response to an infection agent). Thus, polypeptides include gene products, naturally occurring polypeptides, synthetic polypeptides, homologs, orthologs, paralogs, fragments and other equivalents, variants, and analogs of the foregoing. A polypeptide may be a single molecule or may be a multi-molecular complex such as a dimer, trimer, or tetramer. Polypeptides may also comprise single chain or multichain polypeptides such as antibodies or insulin and may be associated or linked. Most commonly, disulfide linkages are found in multichain polypeptides. The term polypeptide may also apply to amino acid polymers in which at least one amino acid residue is an artificial chemical analogue of a corresponding naturally-occurring amino acid.

[0077] A “polypeptide variant” is a molecule that differs in its amino acid sequence relative to a native sequence or a reference sequence. Amino acid sequence variants may possess substitutions, deletions, insertions, or a combination of any two or three of the foregoing, at certain positions within the amino acid sequence, as compared to a native sequence or a reference sequence. Ordinarily, variants possess at least 50% identity to a native sequence or a reference sequence. In some embodiments, variants share at least 80% identity or at least 90% identity with a native sequence or a reference sequence.

[0078] In some embodiments “variant mimics” are provided. A “variant mimic” contains at least one amino acid that would mimic an activated sequence. For example, glutamate may serve as a mimic for phosphoro-threonine and/or phosphoro-serine. Alternatively, variant mimics may result in deactivation or in an inactivated product containing the mimic. For example, phenylalanine may act as an inactivating substitution for tyrosine, or alanine may act as an inactivating substitution for serine.

[0079] “Orthologs” refers to genes in different species that evolved from a common ancestral gene by speciation. Normally, orthologs retain the same function in the course of evolution. Identification of orthologs is important for reliable prediction of gene function in newly sequenced genomes.

[0080] “Analogs” is meant to include polypeptide variants that differ by one or more amino acid alterations, for example, substitutions, additions or deletions of amino acid residues that still maintain one or more of the properties of the parent or starting polypeptide.

[0081] The present disclosure provides several types of compositions that are polynucleotide or polypeptide based, including variants and derivatives. These include, for example, substitutional, insertional, deletion and covalent variants and derivatives. The term “derivative” is synonymous with the term “variant” and generally refers to a molecule that has been modified and/or changed in any way relative to a reference molecule or a starting molecule.

[0082] As such, polynucleotides encoding peptides or polypeptides containing substitutions, insertions and/or additions, deletions and covalent modifications with respect to reference sequences, in particular the polypeptide sequences disclosed herein, are included within the scope of this disclosure. For example, sequence tags or amino acids, such as one or more lysines, can be added to peptide sequences (e.g., at the N-terminal or C-terminal ends). Sequence tags can be used for peptide detection, purification or localization. Lysines can be used to increase peptide solubility or to allow for biotinylation. Alternatively, amino acid residues located at the carboxy and amino terminal regions of the amino acid sequence of a peptide or protein may optionally be deleted providing for truncated sequences. Certain amino acids (e.g., C-terminal residues or N-terminal residues) alternatively may be deleted depending on the use of the sequence, as for example, expression of the sequence as part of a larger sequence that is soluble, or linked to a solid support.

[0083] “Substitutional variants” when referring to polypeptides are those that have at least one amino acid residue in a native or starting sequence removed and a different amino acid inserted in its place at the same position. Substitutions may be single, where only one amino acid in the molecule has been substituted, or they may be multiple, where two or more (e.g., 3, 4 or 5) amino acids have been substituted in the same molecule.

[0084] As used herein the term “conservative amino acid substitution” refers to the substitution of an amino acid that is normally present in the sequence with a different amino acid of similar size, charge, or polarity. Examples of conservative substitutions include the substitution of a non-polar (hydrophobic) residue such as isoleucine, valine and leucine for another non-polar residue. Likewise, examples of conservative substitutions include the substitution of one polar (hydrophilic) residue for another such as between arginine and lysine, between glutamine and asparagine, and between glycine and serine. Additionally, the substitution of a basic residue such as lysine, arginine or histidine for another, or the substitution of one acidic residue such as aspartic acid or glutamic acid for another acidic residue are additional examples of conservative substitutions. Examples of non-conservative substitutions include the substitution of a non-polar (hydrophobic) amino acid residue such as isoleucine, valine, leucine, alanine, methionine for a polar (hydrophilic) residue such as cysteine, glutamine, glutamic acid or lysine and/or a polar residue for a non-polar residue.

[0085] “Features” when referring to polypeptide or polynucleotide are defined as distinct amino acid sequence-based or nucleotide-based components of a molecule respectively. Features of the polypeptides encoded by the polynucleotides include surface manifestations, local conformational shape, folds, loops, half-loops, domains, half-domains, sites, termini and any combination(s) thereof.

[0086] As used herein when referring to polypeptides the term “domain” refers to a motif of a polypeptide having one or more identifiable structural or functional characteristics or properties (e.g., binding capacity, serving as a site for protein-protein interactions).

[0087] As used herein when referring to polypeptides the terms “site” as it pertains to amino acid based embodiments is used synonymously with “amino acid residue” and “amino acid side chain.” As used herein when referring to polynucleotides the terms “site” as it pertains to nucleotide based embodiments is used synonymously with “nucleotide.” A site represents a position within a peptide or polypeptide or polynucleotide that may be modified, manipulated, altered, derivatized or varied within the polypeptide-based or polynucleotide-based molecules.

[0088] As recognized by those skilled in the art, protein fragments, functional protein domains, and homologous proteins are also considered to be within the scope of polypeptides of interest. For example, provided herein is any protein fragment (meaning a polypeptide sequence at least one amino acid residue shorter than a reference polypeptide sequence but otherwise identical) of a reference protein having a length of 10, 20, 30, 40, 50, 60, 70, 80, 90, 100 or longer than 100 amino acids. In another example, any protein that includes a stretch of 20, 30, 40, 50, or 100 (contiguous) amino acids that are 40%, 50%, 60%, 70%, 80%, 90%, 95%, or 100% identical to any of the sequences described herein can be utilized in accordance with the disclosure. In some embodiments, a polypeptide includes 2, 3, 4, 5, 6, 7, 8, 9, 10, or more mutations as shown in any of the sequences provided herein or referenced herein. In another example, any protein that includes a stretch of 20, 30, 40, 50, or 100 amino acids that are greater than 80%, 90%, 95%, or 100% identical to any of the sequences described herein, wherein the protein has a stretch of 5, 10, 15, 20, 25, or 30 amino acids that are less than 80%, 75%, 70%, 65% to 60% identical to any of the sequences described herein can be utilized in accordance with the disclosure.

[0089] Polypeptide or polynucleotide molecules of the present disclosure may share a certain degree of sequence similarity or identity with the reference molecules (e.g., reference polypeptides or reference polynucleotides), for example, with art-described molecules (e.g., engineered or designed molecules or wild-type molecules). The term “identity,” as known in the art, refers to a relationship between the sequences of two or more polypeptides or polynucleotides, as determined by comparing the sequences. In the art, identity also means the degree of sequence relatedness between two sequences as determined by the number of matches between strings of two or more amino acid residues or nucleic acid residues. Identity measures the percent of identical matches between the smaller of two or more sequences with gap alignments (if any) addressed by a particular mathematical model or computer program (e.g., “algorithms”). Identity of related peptides can be readily calculated by known methods. “% identity” as it applies to polypeptide or polynucleotide sequences is defined as the percentage of residues (amino acid residues or nucleic acid residues) in the candidate amino acid or nucleic acid sequence that are identical with the residues in the amino acid sequence or nucleic acid sequence of a second sequence after aligning the sequences and introducing gaps, if necessary, to achieve the maximum percent identity. Methods and computer programs for the alignment are well known in the art. Identity depends on a calculation of percent identity but may differ in value due to gaps and penalties introduced in the calculation. Generally, variants of a particular polynucleotide or polypeptide have at least 40%, 45%, 50%, 55%, 60%, 65%, 70%, 75%, 80%, 85%, 90%, 91%, 92%, 93%, 94%, 95%, 96%, 97%, 98%, 99% but less than 100% sequence identity to that particular reference polynucleotide or polypeptide as determined by sequence alignment programs and parameters described herein and known to those skilled in the art. Such tools for alignment include those of the BLAST suite (Stephen F. Altschul, et al. (1997). “Gapped BLAST and PSI-BLAST: a new generation of protein database search programs,” Nucleic Acids Res. 25:3389-3402). Another popular local alignment technique is based on the Smith-Waterman algorithm (Smith, T. F. & Waterman, M. S. (1981) “Identification of common molecular subsequences.” J. Mol. Biol. 147:195-197). A general global alignment technique based on dynamic programming is the Needleman-Wunsch algorithm (Needleman, S. B. & Wunsch, C. D. (1970) “A general method applicable to the search for similarities in the amino acid sequences of two proteins.” J. Mol. Biol. 48:443-453). More recently, a Fast Optimal Global Sequence Alignment Algorithm (FOGSAA) was developed that purportedly produces global alignment of nucleotide and protein sequences faster than other optimal global alignment methods, including the Needleman-Wunsch algorithm. Other tools are described herein, specifically in the definition of “identity” below.

[0090] As used herein, the term “homology” refers to the overall relatedness between polymeric molecules, e.g. between nucleic acid molecules (e.g. DNA molecules and/or RNA molecules) and/or between polypeptide molecules. Polymeric molecules (e.g. nucleic acid molecules (e.g. DNA molecules and/or RNA molecules) and/or polypeptide molecules) that share a threshold level of similarity or identity determined by alignment of matching residues are termed homologous. Homology is a qualitative term that describes a relationship between molecules and can be based upon the quantitative similarity or identity. Similarity or identity is a quantitative term that defines the degree of sequence match between two compared sequences. In some embodiments, polymeric molecules are considered to be “homologous” to one another if their sequences are at least 25%, 30%, 35%, 40%, 45%, 50%, 55%, 60%, 65%, 70%, 75%, 80%, 85%, 90%, 95%, or 99% identical or similar. The term “homologous” necessarily refers to a comparison between at least two sequences (polynucleotide or polypeptide sequences). Two polynucleotide sequences are considered homologous if the polypeptides they encode are at least 50%, 60%, 70%, 80%, 90%, 95%, or even 99% for at least one stretch of at least 20 amino acids. In some embodiments, homologous polynucleotide sequences are characterized by the ability to encode a stretch of at least 4-5 uniquely specified amino acids. For polynucleotide sequences less than 60 nucleotides in length, homology is determined by the ability to encode a stretch of at least 4-5 uniquely specified amino acids. Two protein sequences are considered homologous if the proteins are at least 50%, 60%, 70%, 80%, or 90% identical for at least one stretch of at least 20 amino acids.

[0091] Homology implies that the compared sequences diverged in evolution from a common origin. The term “homolog” refers to a first amino acid sequence or nucleic acid sequence (e.g., gene (DNA or RNA) or protein sequence) that is related to a second amino acid sequence or nucleic acid sequence by descent from a common ancestral sequence. The term “homolog” may apply to the relationship between genes and/or proteins separated by the event of speciation or to the relationship between genes and/or proteins separated by the event of genetic duplication. “Orthologs” are genes (or proteins) in different species that evolved from a common ancestral gene (or protein) by speciation. Typically, orthologs retain the same function in the course of evolution. “Paralogs” are genes (or proteins) related by duplication within a genome. Orthologs retain the same function in the course of evolution, whereas paralogs evolve new functions, even if these are related to the original one.

[0092] The term “identity” refers to the overall relatedness between polymeric molecules, for example, between polynucleotide molecules (e.g. DNA molecules and/or RNA molecules) and/or between polypeptide molecules. Calculation of the percent identity of two polynucleic acid sequences, for example, can be performed by aligning the two sequences for optimal comparison purposes (e.g., gaps can be introduced in one or both of a first and a second nucleic acid sequences for optimal alignment and non-identical sequences can be disregarded for comparison purposes). In certain embodiments, the length of a sequence aligned for comparison purposes is at least 30%, at least 40%, at least 50%, at least 60%, at least 70%, at least 80%, at least 90%, at least 95%, or 100% of the length of the reference sequence. The nucleotides at corresponding nucleotide positions are then compared. When a position in the first sequence is occupied by the same nucleotide as the corresponding position in the second sequence, then the molecules are identical at that position. The percent identity between the two sequences is a function of the number of identical positions shared by the sequences, taking into account the number of gaps, and the length of each gap, which needs to be introduced for optimal alignment of the two sequences. The comparison of sequences and determination of percent identity between two sequences can be accomplished using a mathematical algorithm. For example, the percent identity between two nucleic acid sequences can be determined using methods such as those described in Computational Molecular Biology, Lesk, A. M., ed., Oxford University Press. New York, 1988; Biocomputing: Informatics and Genome Projects, Smith, D. W., ed., Academic Press, New York. 1993; Sequence Analysis in Molecular Biology, von Heinje, G., Academic Press, 1987; Computer Analysis of Sequence Data, Part I, Griffin, A. M., and Griffin, H. G., eds., Humana Press, New Jersey, 1994; and Sequence Analysis Primer, Gribskov, M. and Devereux, J., eds., M Stockton Press, New York, 1991; each of which is incorporated herein by reference. For example, the percent identity between two nucleic acid sequences can be determined using the algorithm of Meyers and Miller (CABIOS, 1989, 4:11-17), which has been incorporated into the ALIGN program (version 2.0) using a PAM120 weight residue table, a gap length penalty of 12 and a gap penalty of 4. The percent identity between two nucleic acid sequences can, alternatively, be determined using the GAP program in the GCG software package using an NWSgapdna.CMP matrix. Methods commonly employed to determine percent identity between sequences include, but are not limited to those disclosed in Carillo, H., and Lipman, D., SIAM J Applied Math., 48:1073 (1988); incorporated herein by reference. Techniques for determining identity are codified in publicly available computer programs. Exemplary computer software to determine homology between two sequences include, but are not limited to, GCG program package, Devereux, J., et al., Nucleic Acids Research, 12 (1), 387 (1984)), BLASTP, BLASTN, and FASTA Altschul, S. F. et al., J. Molec. Biol., 215, 403 (1990)).

[0093] The term “complementary” refers to the topological compatibility or matching together of interacting surfaces of a probe molecule and its target. Thus, the target and its probe can be described as complementary, and furthermore, the contact surface characteristics are complementary to each other.

[0094] The term “hybridization” refers to a process of establishing a non-covalent, sequence-specific interaction between two or more complementary strands of nucleic acids into a single hybrid, which in the case of two strands is referred to as a duplex.

[0095] The term “anneal” refers to the process by which a single-stranded nucleic acid sequence pairs by hydrogen bonds to a complementary sequence, forming a double-stranded nucleic acid sequence, including the reformation (renaturation) of complementary strands that were separated by heat (thermally denatured).

[0096] The term “melting” refers to the denaturation of a double-stranded nucleic acid sequence due to high temperatures, resulting in the separation of the double strand into two single strands by breaking the hydrogen bonds between the strands.

[0097] The term “target” refers to a molecule that has an affinity for a given probe. Targets may be naturally-occurring or man-made molecules. Also, they can be employed in their unaltered state or as aggregates with other species.

[0098] The term “promoter” or “regulatory element” refers to a region or sequence determinants located upstream or downstream from the start of transcription and which are involved in recognition and binding of RNA polymerase and other proteins to initiate transcription. Promoters need not be of bacterial origin, for example, promoters derived from viruses or from other organisms can be used in the compositions, systems, or methods described herein. The term “regulatory element” is intended to include promoters, enhancers, internal ribosomal entry sites (IRES), and other expression control elements (e.g. transcription termination signals, such as polyadenylation signals and poly-U sequences). Such regulatory elements are described, for example, in Goeddel, Gene Expression Technology: Methods in Enzymology 185, Academic Press, San Diego, Calif. (1990). Regulatory elements include those that direct constitutive expression of a nucleotide sequence in many types of host cell and those that direct expression of the nucleotide sequence only in certain host cells (e.g., tissue-specific regulatory sequences). A tissue-specific promoter may direct expression primarily in a desired tissue of interest, such as muscle, neuron, bone, skin, blood, specific organs (e.g. liver, pancreas), or particular cell types (e.g. lymphocytes). Regulatory elements may also direct expression in a temporal-dependent manner, such as in a cell-cycle dependent or developmental stage-dependent manner, which may or may not also be tissue or cell-type specific. In some embodiments, a vector comprises one or more pol III promoter (e.g. 1, 2, 3, 4, 5, or more pol I promoters), one or more pol II promoters (e.g. 1, 2, 3, 4, 5, or more pol II promoters), one or more pol I promoters (e.g. 1, 2, 3, 4, 5, or more pol I promoters), or combinations thereof. Examples of pol III promoters include, but are not limited to, U6 and H1 promoters. Examples of pol II promoters include, but are not limited to, the retroviral Rous sarcoma virus (RSV) LTR promoter (optionally with the RSV enhancer), the cytomegalovirus (CMV) promoter (optionally with the CMV enhancer) [see, e.g., Boshart et al, Cell, 41:521-530 (1985)|, the SV40 promoter, the dihydrofolate reductase promoter, the β-actin promoter, the phosphoglycerol kinase (PGK) promoter, and the EF1α promoter. Also encompassed by the term “regulatory element” are enhancer elements, such as WPRE; CMV enhancers; the R-U5′ segment in LTR of HTLV-I (Mol. Cell. Biol., Vol. 8 (1), p. 466-472, 1988); SV40 enhancer; and the intron sequence between exons 2 and 3 of rabbit β-globin (Proc. Natl. Acad. Sci. USA., Vol. 78 (3), p. 1527-31, 1981). It is appreciated by those skilled in the art that the design of the expression vector can depend on such factors as the choice of the host cell to be transformed, the level of expression desired, etc.

[0099] The term “recombinant” refers to a human manipulated nucleic acid (e.g. polynucleotide) or a copy or complement of a human manipulated nucleic acid (e.g. polynucleotide), or if in reference to a protein (i.e, a “recombinant protein”), a protein encoded by a recombinant nucleic acid (e.g. polynucleotide). In embodiments, a recombinant expression cassette comprising a promoter operably linked to a second nucleic acid (e.g. polynucleotide) may include a promoter that is heterologous to the second nucleic acid (e.g. polynucleotide) as the result of human manipulation (e.g., by methods described in Sambrook et al., Molecular Cloning—A Laboratory Manual, Cold Spring Harbor Laboratory, Cold Spring Harbor, N.Y., (1989) or Current Protocols in Molecular Biology Volumes 1-3, John Wiley & Sons, Inc. (1994-1998)). In another example, a recombinant expression cassette may comprise nucleic acids (e.g. polynucleotides) combined in such a way that the nucleic acids (e.g. polynucleotides) are extremely unlikely to be found in nature. For instance, human manipulated restriction sites or plasmid vector sequences may flank or separate the promoter from the second nucleic acid (e.g. polynucleotide). One of skill will recognize that nucleic acids (e.g. polynucleotides) can be manipulated in many ways and are not limited to the examples above.

[0100] The term “expression cassette” refers to a nucleic acid construct, which when introduced into a host cell, results in transcription and/or translation of a RNA or polypeptide, respectively. In embodiments, an expression cassette comprising a promoter operably linked to a second nucleic acid (e.g. polynucleotide) may include a promoter that is heterologous to the second nucleic acid (e.g. polynucleotide) as the result of human manipulation (e.g., by methods described in Sambrook et al., Molecular Cloning—A Laboratory Manual, Cold Spring Harbor Laboratory, Cold Spring Harbor, N.Y., (1989) or Current Protocols in Molecular Biology Volumes 1-3, John Wiley & Sons, Inc. (1994-1998)). In some embodiments, an expression cassette comprising a terminator (or termination sequence) operably linked to a second nucleic acid (e.g. polynucleotide) may include a terminator that is heterologous to the second nucleic acid (e.g. polynucleotide) as the result of human manipulation. In some embodiments, the expression cassette comprises a promoter operably linked to a second nucleic acid (e.g. polynucleotide) and a terminator operably linked to the second nucleic acid (e.g. polynucleotide) as the result of human manipulation. In some embodiments, the expression cassette comprises an endogenous promoter. In some embodiments, the expression cassette comprises an endogenous terminator. In some embodiments, the expression cassette comprises a synthetic (or non-natural) promoter. In some embodiments, the expression cassette comprises a synthetic (or non-natural) terminator.

[0101] Nucleic acid is “operably linked” when it is placed into a functional relationship with another nucleic acid sequence. For example, DNA for a presequence or secretory leader is operably linked to DNA for a polypeptide if it is expressed as a preprotein that participates in the secretion of the polypeptide; a promoter or enhancer is operably linked to a coding sequence if it affects the transcription of the sequence; or a ribosome binding site is operably linked to a coding sequence if it is positioned so as to facilitate translation. Generally, “operably linked” means that the DNA sequences being linked are near each other, and, in the case of a secretory leader, contiguous and in reading phase. However, operably linked nucleic acids (e.g. enhancers and coding sequences) do not have to be contiguous. Linking is accomplished by ligation at convenient restriction sites. If such sites do not exist, the synthetic oligonucleotide adaptors or linkers are used in accordance with conventional practice. In embodiments, a promoter is operably linked with a coding sequence when it is capable of affecting (e.g. modulating relative to the absence of the promoter) the expression of a protein from that coding sequence (i.e., the coding sequence is under the transcriptional control of the promoter).

[0102] The term “nucleobase” refers to the part of a nucleotide that bears the Watson/Crick base-pairing functionality. The most common naturally-occurring nucleobases, adenine (A), guanine (G), uracil (U), cytosine (C), and thymine (T) bear the hydrogen-bonding functionality that binds one nucleic acid strand to another in a sequence specific manner.

[0103] A nucleic acid sequence is “heterologous” to a second nucleic acid sequence if it originates from a foreign species, or, if from the same species, is modified by human action from its original form. For example, a heterologous promoter (or heterologous 5′ untranslated region (5′UTR)) operably linked to a coding sequence refers to a coding sequence from a species different from that from which the promoter was derived, or, if from the same species, a coding sequence which is different from naturally occurring allelic variants (for example, the 5′UTR or 3′UTR from a different gene is operably linked to a nucleic acid encoding for a co-stimulatory molecule).

[0104] The term “monoclonal antibody” as used herein refers to an antibody obtained from a substantially homogeneous population of antibodies, i.e., the individual antibodies within the population are identical except for possible naturally occurring mutations that may be present in a small subset of the antibody molecules. The monoclonal antibodies herein specifically include “chimeric” antibodies in which a portion of the heavy and/or light chain is identical with or homologous to corresponding sequences in antibodies derived from a particular species or belonging to a particular antibody class or subclass, while the remainder of the chain(s) is identical with or homologous to corresponding sequences in antibodies derived from another species or belonging to another antibody class or subclass, as well as fragments of such antibodies, as long as they exhibit the desired antagonistic activity.

[0105] The disclosed monoclonal antibodies can be made using any procedure which produces monoclonal antibodies. For example, disclosed monoclonal antibodies can be prepared using hybridoma methods, such as those described by Kohler and Milstein, Nature, 256:495 (1975). In a hybridoma method, a mouse or other appropriate host animal is typically immunized with an immunizing agent to elicit lymphocytes that produce or are capable of producing antibodies that will specifically bind to the immunizing agent. Alternatively, the lymphocytes may be immunized in vitro.

[0106] The monoclonal antibodies may also be made by recombinant DNA methods. DNA encoding the disclosed monoclonal antibodies can be readily isolated and sequenced using conventional procedures (e.g., by using oligonucleotide probes that are capable of binding specifically to genes encoding the heavy and light chains of murine antibodies). Libraries of antibodies or active antibody fragments can also be generated and screened using phage display techniques, e.g., as described in U.S. Pat. No. 5,804,440 to Burton et al. and U.S. Pat. No. 6,096,441 to Barbas et al.

[0107] In vitro methods are also suitable for preparing monovalent antibodies. Digestion of antibodies to produce fragments thereof, particularly, Fab fragments, can be accomplished using routine techniques known in the art. For instance, digestion can be performed using papain. Examples of papain digestion are described in WO 94/29348 published Dec. 22, 1994 and U.S. Pat. No. 4,342,566. Papain digestion of antibodies typically produces two identical antigen binding fragments, called Fab fragments, each with a single antigen binding site, and a residual Fc fragment. Pepsin treatment yields a fragment that has two antigen combining sites and is still capable of cross-linking antigen.

[0108] As used herein, the term “antibody or antigen binding fragment thereof” or “antibody or fragments thereof” encompasses chimeric antibodies and hybrid antibodies, with dual or multiple antigen or epitope specificities, and fragments, such as F(ab′)2, Fab′, Fab, Fv, sFv, scFv and the like, including hybrid fragments. Thus, fragments of the antibodies that retain the ability to bind their specific antigens are provided. For example, fragments of antibodies which maintain binding activity are included within the meaning of the term “antibody or antigen binding fragment thereof.” Such antibodies and fragments can be made by techniques known in the art and can be screened for specificity and activity according to the methods set forth in the Examples and in general methods for producing antibodies and screening antibodies for specificity and activity (See Harlow and Lane. Antibodies, A Laboratory Manual. Cold Spring Harbor Publications, New York, (1988)).

[0109] Also included within the meaning of “antibody or antigen binding fragment thereof” are conjugates of antibody fragments and antigen binding proteins (single chain antibodies). Also included within the meaning of “antibody or antigen binding fragment thereof” are immunoglobulin single variable domains, such as for example a nanobody.

[0110] The fragments, whether attached to other sequences or not, can also include insertions, deletions, substitutions, or other selected modifications of particular regions or specific amino acids residues, provided the activity of the antibody or antibody fragment is not significantly altered or impaired compared to the non-modified antibody or antibody fragment. These modifications can provide for some additional property, such as to remove/add amino acids capable of disulfide bonding, to increase its bio-longevity, to alter its secretory characteristics, etc. In any case, the antibody or antibody fragment must possess a bioactive property, such as specific binding to its cognate antigen. Functional or active regions of the antibody or antibody fragment may be identified by mutagenesis of a specific region of the protein, followed by expression and testing of the expressed polypeptide. Such methods are readily apparent to a skilled practitioner in the art and can include site-specific mutagenesis of the nucleic acid encoding the antibody or antibody fragment. (Zoller, M. J. Curr. Opin. Biotechnol. 3:348-354, 1992).

[0111] As used herein, the term “antibody” or “antibodies” can also refer to a human antibody and/or a humanized antibody. Many non-human antibodies (e.g., those derived from mice, rats, or rabbits) are naturally antigenic in humans, and thus can give rise to undesirable immune responses when administered to humans. Therefore, the use of human or humanized antibodies in the methods serves to lessen the chance that an antibody administered to a human will evoke an undesirable immune response.

[0112] As used herein, “immune effector cells” refers to cells capable of binding an antigen or a peptide and which mediate an immune response. These cells include, but are not limited to, T cells (include CD4+ and CD8+ T cells), B cells, monocytes, macrophages, NK cells and cytotoxic T lymphocytes (CTLs).

### Chemical Definitions

[0113] As used herein, the term “substituted” is contemplated to include all permissible substituents of organic compounds. In a broad aspect, the permissible substituents include acyclic and cyclic, branched and unbranched, carbocyclic and heterocyclic, and aromatic and nonaromatic substituents of organic compounds. Illustrative substituents include, for example, those described below. The permissible substituents can be one or more and the same or different for appropriate organic compounds. For purposes of this disclosure, the heteroatoms, such as nitrogen, can have hydrogen substituents and/or any permissible substituents of organic compounds described herein which satisfy the valences of the heteroatoms. This disclosure is not intended to be limited in any manner by the permissible substituents of organic compounds. Also, the terms “substitution” or “substituted with” include the implicit proviso that such substitution is in accordance with permitted valence of the substituted atom and the substituent, and that the substitution results in a stable compound, e.g., a compound that does not spontaneously undergo transformation such as by rearrangement, cyclization, elimination, etc.

[0114] “Z¹,” “Z²,” “Z³,” and “Z⁴” are used herein as generic symbols to represent various specific substituents. These symbols can be any substituent, not limited to those disclosed herein, and when they are defined to be certain substituents in one instance, they can, in another instance, be defined as some other substituents.

[0115] The term “aliphatic” as used herein refers to a non-aromatic hydrocarbon group and includes branched and unbranched, alkyl, alkenyl, or alkynyl groups.

[0116] The term “alkyl” as used herein is a branched or unbranched saturated hydrocarbon group of 1 to 24 carbon atoms, such as methyl, ethyl, n-propyl, isopropyl, n-butyl, isobutyl, t-butyl, pentyl, hexyl, heptyl, octyl, nonyl, decyl, dodecyl, tetradecyl, hexadecyl, eicosyl, tetracosyl, and the like. The alkyl group can also be substituted or unsubstituted. The alkyl group can be substituted with one or more groups including, but not limited to, alkyl, halogenated alkyl, alkoxy, alkenyl, alkynyl, aryl, heteroaryl, aldehyde, amino, carboxylic acid, ester, ether, halide, hydroxy, ketone, nitro, silyl, sulfo-oxo, sulfonyl, sulfone, sulfoxide, or thiol, as described below.

[0117] Throughout the specification “alkyl” is generally used to refer to both unsubstituted alkyl groups and substituted alkyl groups; however, substituted alkyl groups are also specifically referred to herein by identifying the specific substituent(s) on the alkyl group. For example, the term “halogenated alkyl” specifically refers to an alkyl group that is substituted with one or more halide, e.g., fluorine, chlorine, bromine, or iodine. The term “alkoxyalkyl” specifically refers to an alkyl group that is substituted with one or more alkoxy groups, as described below. The term “alkylamino” specifically refers to an alkyl group that is substituted with one or more amino groups, as described below, and the like. When “alkyl” is used in one instance and a specific term such as “alkylalcohol” is used in another, it is not meant to imply that the term “alkyl” does not also refer to specific terms such as “alkylalcohol” and the like.

[0118] This practice is also used for other groups described herein. That is, while a term such as “cycloalkyl” refers to both unsubstituted and substituted cycloalkyl moieties, the substituted moieties can, in addition, be specifically identified herein; for example, a particular substituted cycloalkyl can be referred to as, e.g., an “alkylcycloalkyl.” Similarly, a substituted alkoxy can be specifically referred to as, e.g., a “halogenated alkoxy,” a particular substituted alkenyl can be, e.g., an “alkenylalcohol,” and the like. Again, the practice of using a general term, such as “cycloalkyl,” and a specific term, such as “alkylcycloalkyl,” is not meant to imply that the general term does not also include the specific term.

[0119] The term “alkoxy” as used herein is an alkyl group bound through a single, terminal ether linkage; that is, an “alkoxy” group can be defined as —OZ¹ where Z¹ is alkyl as defined above.

[0120] The term “alkenyl” as used herein is a hydrocarbon group of from 2 to 24 carbon atoms with a structural formula containing at least one carbon-carbon double bond. Asymmetric structures such as (Z¹Z²)C═C(Z³Z⁴) are intended to include both the E and Z isomers. This can be presumed in structural formulae herein wherein an asymmetric alkene is present, or it can be explicitly indicated by the bond symbol C═C. The alkenyl group can be substituted with one or more groups including, but not limited to, alkyl, halogenated alkyl, alkoxy, alkenyl, alkynyl, aryl, heteroaryl, aldehyde, amino, carboxylic acid, ester, ether, halide, hydroxy, ketone, nitro, silyl, sulfo-oxo, sulfonyl, sulfone, sulfoxide, or thiol, as described below.

[0121] The term “alkynyl” as used herein is a hydrocarbon group of 2 to 24 carbon atoms with a structural formula containing at least one carbon-carbon triple bond. The alkynyl group can be substituted with one or more groups including, but not limited to, alkyl, halogenated alkyl, alkoxy, alkenyl, alkynyl, aryl, heteroaryl, aldehyde, amino, carboxylic acid, ester, ether, halide, hydroxy, ketone, nitro, silyl, sulfo-oxo, sulfonyl, sulfone, sulfoxide, or thiol, as described below.

[0122] The term “aryl” as used herein is a group that contains any carbon-based aromatic group including, but not limited to, benzene, naphthalene, phenyl, biphenyl, phenoxybenzene, and the like. The term “heteroaryl” is defined as a group that contains an aromatic group that has at least one heteroatom incorporated within the ring of the aromatic group. Examples of heteroatoms include, but are not limited to, nitrogen, oxygen, sulfur, and phosphorus. The term “non-heteroaryl,” which is included in the term “aryl,” defines a group that contains an aromatic group that does not contain a heteroatom. The aryl or heteroaryl group can be substituted or unsubstituted. The aryl or heteroaryl group can be substituted with one or more groups including, but not limited to, alkyl, halogenated alkyl, alkoxy, alkenyl, alkynyl, aryl, heteroaryl, aldehyde, amino, carboxylic acid, ester, ether, halide, hydroxy, ketone, nitro, silyl, sulfo-oxo, sulfonyl, sulfone, sulfoxide, or thiol as described herein. The term “biaryl” is a specific type of aryl group and is included in the definition of aryl. Biaryl refers to two aryl groups that are bound together via a fused ring structure, as in naphthalene, or are attached via one or more carbon-carbon bonds, as in biphenyl.

[0123] The term “cycloalkyl” as used herein is a non-aromatic carbon-based ring composed of at least three carbon atoms. Examples of cycloalkyl groups include, but are not limited to, cyclopropyl, cyclobutyl, cyclopentyl, cyclohexyl, etc. The term “heterocycloalkyl” is a cycloalkyl group as defined above where at least one of the carbon atoms of the ring is substituted with a heteroatom such as, but not limited to, nitrogen, oxygen, sulfur, or phosphorus. The cycloalkyl group and heterocycloalkyl group can be substituted or unsubstituted. The cycloalkyl group and heterocycloalkyl group can be substituted with one or more groups including, but not limited to, alkyl, alkoxy, alkenyl, alkynyl, aryl, heteroaryl, aldehyde, amino, carboxylic acid, ester, ether, halide, hydroxy, ketone, nitro, silyl, sulfo-oxo, sulfonyl, sulfone, sulfoxide, or thiol as described herein.

[0124] The term “cycloalkenyl” as used herein is a non-aromatic carbon-based ring composed of at least three carbon atoms and containing at least one double bound, i.e., C═C. Examples of cycloalkenyl groups include, but are not limited to, cyclopropenyl, cyclobutenyl, cyclopentenyl, cyclopentadienyl, cyclohexenyl, cyclohexadienyl, and the like. The term “heterocycloalkenyl” is a type of cycloalkenyl group as defined above, and is included within the meaning of the term “cycloalkenyl,” where at least one of the carbon atoms of the ring is substituted with a heteroatom such as, but not limited to, nitrogen, oxygen, sulfur, or phosphorus. The cycloalkenyl group and heterocycloalkenyl group can be substituted or unsubstituted. The cycloalkenyl group and heterocycloalkenyl group can be substituted with one or more groups including, but not limited to, alkyl, alkoxy, alkenyl, alkynyl, aryl, heteroaryl, aldehyde, amino, carboxylic acid, ester, ether, halide, hydroxy, ketone, nitro, silyl, sulfo-oxo, sulfonyl, sulfone, sulfoxide, or thiol as described herein.

[0125] The term “cyclic group” is used herein to refer to either aryl groups, non-aryl groups (i.e., cycloalkyl, heterocycloalkyl, cycloalkenyl, and heterocycloalkenyl groups), or both. Cyclic groups have one or more ring systems that can be substituted or unsubstituted. A cyclic group can contain one or more aryl groups, one or more non-aryl groups, or one or more aryl groups and one or more non-aryl groups.

[0126] The term “aldehyde” as used herein is represented by the formula —C(O)H. Throughout this specification “C(O)” or “CO” is a short hand notation for C═O.

[0127] The terms “amine” or “amino” as used herein are represented by the formula —NZ¹Z², where Z¹ and Z² can each be substitution group as described herein, such as hydrogen, an alkyl, halogenated alkyl, alkenyl, alkynyl, aryl, heteroaryl, cycloalkyl, cycloalkenyl, heterocycloalkyl, or heterocycloalkenyl group described above.

[0128] The term “carboxylic acid” as used herein is represented by the formula —C(O)OH. A “carboxylate” or “carboxyl” group as used herein is represented by the formula —C(O)O⁻.

[0129] The term “ester” as used herein is represented by the formula —OC(O)Z¹ or —C(O)OZ¹, where Z¹ can be an alkyl, halogenated alkyl, alkenyl, alkynyl, aryl, heteroaryl, cycloalkyl, cycloalkenyl, heterocycloalkyl, or heterocycloalkenyl group described above.

[0130] The term “ether” as used herein is represented by the formula Z¹OZ², where Z¹ and Z² can be, independently, an alkyl, halogenated alkyl, alkenyl, alkynyl, aryl, heteroaryl, cycloalkyl, cycloalkenyl, heterocycloalkyl, or heterocycloalkenyl group described above.

[0131] The term “ketone” as used herein is represented by the formula Z¹C (O) Z², where Z¹ and Z² can be, independently, an alkyl, halogenated alkyl, alkenyl, alkynyl, aryl, heteroaryl, cycloalkyl, cycloalkenyl, heterocycloalkyl, or heterocycloalkenyl group described above.

[0132] The term “halide” or “halogen” as used herein refers to the fluorine, chlorine, bromine, and iodine.

[0133] The term “hydroxyl” as used herein is represented by the formula —OH.

[0134] The term “nitro” as used herein is represented by the formula —NO₂.

[0135] The term “silyl” as used herein is represented by the formula —SiZ¹Z²Z³, where Z¹, Z², and Z³ can be, independently, hydrogen, alkyl, halogenated alkyl, alkoxy, alkenyl, alkynyl, aryl, heteroaryl, cycloalkyl, cycloalkenyl, heterocycloalkyl, or heterocycloalkenyl group described above.

[0136] The term “sulfonyl” is used herein to refer to the sulfo-oxo group represented by the formula —S(O)₂Z¹, where Z¹ can be hydrogen, an alkyl, halogenated alkyl, alkenyl, alkynyl, aryl, heteroaryl, cycloalkyl, cycloalkenyl, heterocycloalkyl, or heterocycloalkenyl group described above.

[0137] The term “sulfonylamino” or “sulfonamide” as used herein is represented by the formula —S(O)₂NH—.

[0138] The term “phosphonyl” is used herein to refer to the phospho-oxo group represented by the formula —P(O)(OZ¹)₂, where Z¹ can be hydrogen, an alkyl, halogenated alkyl, alkenyl, alkynyl, aryl, heteroaryl, cycloalkyl, cycloalkenyl, heterocycloalkyl, or heterocycloalkenyl group described above.

[0139] The term “thiol” as used herein is represented by the formula —SH.

[0140] The term “thio” as used herein is represented by the formula —S—.

[0141] “R¹,” “R²,” “R³,” “Rⁿ,” etc., where n is some integer, as used herein can, independently, possess one or more of the groups listed above. For example, if R¹ is a straight chain alkyl group, one of the hydrogen atoms of the alkyl group can optionally be substituted with a hydroxyl group, an alkoxyl group, an amine group, an alkyl group, a halide, and the like. Depending upon the groups that are selected, a first group can be incorporated within second group or, alternatively, the first group can be pendant (i.e., attached) to the second group. For example, with the phrase “an alkyl group comprising an amino group,” the amino group can be incorporated within the backbone of the alkyl group. Alternatively, the amino group can be attached to the backbone of the alkyl group. The nature of the group(s) that is (are) selected will determine if the first group is embedded or attached to the second group.

[0142] Unless stated to the contrary, a formula with chemical bonds shown only as solid lines and not as wedges or dashed lines contemplates each possible isomer, e.g., each enantiomer, diastereomer, and meso compound, and a mixture of isomers, such as a racemic or scalemic mixture.

[0143] Reference will now be made in detail to specific aspects of the disclosed materials, compounds, compositions, articles, and methods, examples of which are illustrated in the accompanying Examples and Figures.

### Compositions

[0144] Described herein are compositions including a nucleic acid sequence (e.g., mRNA) encoding an infection agent antigenic polypeptide and a nucleic acid sequence (e.g., mRNA) encoding at least one universal T-cell epitope, as well as, compositions including a nucleic acid sequence (e.g., mRNA) encoding an infection agent antigenic polypeptide and at least one universal T-cell epitope.

[0145] The compositions described herein, can include multiple nucleic acid sequences (e.g., mRNA), each encoding a single infection agent antigenic polypeptide and multiple nucleic acid sequences (e.g., mRNA), each encoding a single universal T-cell epitope, as well as compositions including a single nucleic acid sequence (e.g., mRNA) encoding one or more infection agent antigenic polypeptide and a single nucleic acid sequence (e.g., mRNA) encoding one or more universal T-cell epitope(s).

[0146] The compositions described herein, can include multiple nucleic acid sequences (e.g., mRNA) each encoding a single infection agent antigenic polypeptide and a single universal T-cell epitope, as well as, compositions including a single nucleic acid sequence (e.g., mRNA) encoding one or more infection agent antigenic polypeptide and one or more universal T-cell epitope(s).

[0147] Thus, a composition including a nucleic acid sequence encoding an infection agent antigenic polypeptide and at least one universal T-cell epitope, encompasses compositions that include a nucleic acid sequence encoding a first infection agent antigenic polypeptide, a second infection agent antigenic polypeptide, a first universal T-cell epitope, and a second universal T-cell epitope. In some embodiments, a composition including a nucleic acid sequence encoding an infection agent antigenic polypeptide and a nucleic acid sequence encoding at least one universal T-cell epitope, encompasses compositions that include a first nucleic acid sequence encoding a first infection agent antigenic polypeptide, a second nucleic acid sequence encoding a second infection agent antigenic polypeptide, a third nucleic acid sequence encoding a first universal T-cell epitope, and a fourth nucleic acid sequence encoding a second universal T-cell epitope.

[0148] The compositions described herein, in some embodiments, include 2-10 (e.g., 2, 3, 4, 5, 6, 7, 8, 9 or 10), or more, nucleic acid sequence (e.g. mRNA) having an open reading frame, each of which encodes a different infection agent antigenic polypeptide (or a single nucleic acid sequence (e.g. mRNA) encoding 2-10, or more, different infection agent antigenic polypeptides). The compositions described herein, in some embodiments, include 2-10 (e.g., 2, 3, 4, 5, 6, 7, 8, 9 or 10), or more, nucleic acid sequence (e.g. mRNA) having an open reading frame, each of which encodes a different universal T-cell epitope (or a single nucleic acid sequence (e.g. mRNA) encoding 2-10, or more, different universal T-cell epitopes).

[0149] In some embodiments, the nucleic acid sequence (e.g. mRNA) encoding the infection agent antigenic polypeptide can elicit an antibody response in a subject. In some embodiments, the nucleic acid sequence (e.g. mRNA) encoding the infection agent antigenic polypeptide can elicit a broad T-cell response in a subject. In some embodiments, the nucleic acid sequence (e.g. mRNA) encoding the infection agent antigenic polypeptide can elicit both an antibody response and a T-cell response in a subject.

[0150] In some embodiments, the nucleic acid sequence (e.g. mRNA) encoding the infection agent antigenic polypeptide can elicit a cellular immune response, a humoral immune response, or a combination thereof. In some embodiments, the nucleic acid sequence (e.g. mRNA) encoding the infection agent antigenic polypeptide can elicit a cellular immune response, a humoral immune response, or a combination thereof, without risking the possibility of insertional mutagenesis. In some embodiments, the universal T-cell epitope can provide broader protection against infection agent variants.

[0151] In some embodiments, the compositions can further include a pharmaceutically acceptable carrier. In some aspects, disclosed herein is a pharmaceutical composition can include a nucleic acid sequence (e.g. mRNA) encoding an infection agent antigenic polypeptide, a nucleic acid sequence (e.g. mRNA) encoding at least one universal T-cell epitope, and a pharmaceutically acceptable carrier. In some aspects, disclosed herein is a pharmaceutical composition including an nucleic acid sequence (e.g. mRNA) encoding an infection agent antigenic polypeptide and at least one T-cell epitope; and a pharmaceutically acceptable carrier. In some embodiments, the composition can be a nanoparticle, a lipid nanoparticle dispersion, a liposomal formulation, a lipid emulsion, vaccine, vector, or any combination thereof.

[0152] In some embodiments, the nucleic acid sequence can include a DNA, RNA, any combination thereof (e.g., plasmid DNA, minicircle DNA, minimalistic, immunologically defined gene expression (MIDGE) and Doggybone, messenger RNA (mRNA), circle (cirRNA), self-amplifying-RNA (saRNA, also refer as SAM), or DNA launched SAM (DLSAM)). In some embodiments, the compositions can include a plasmid DNA(s) encoding an infection agent antigenic polypeptide and a universal T-cell epitope.

### Signal Peptides

[0153] In some embodiments, antigenic polypeptides encoded by nucleic acid sequence (e.g., mRNA) comprise a signal peptide. In some embodiments, T-cell epitope encoded by nucleic acid sequence (e.g., mRNA) comprise a signal peptide. Signal peptides, comprising the N-terminal 15-60 amino acids of proteins, are typically needed for the translocation across the membrane on the secretory pathway and, thus, universally control the entry of most proteins both in eukaryotes and prokaryotes to the secretory pathway. Signal peptides generally include three regions: an N-terminal region of differing length, which usually comprises positively charged amino acids; a hydrophobic region; and a short carboxy-terminal peptide region. In eukaryotes, the signal peptide of a nascent precursor protein (pre-protein) directs the ribosome to the rough endoplasmic reticulum (ER) membrane and initiates the transport of the growing peptide chain across it for processing. ER processing produces mature proteins, wherein the signal peptide is cleaved from precursor proteins, typically by an ER-resident signal peptidase of the host cell, or they remain uncleaved and function as a membrane anchor. A signal peptide may also facilitate the targeting of the protein to the cell membrane. The signal peptide, however, is not responsible for the final destination of the mature protein. Secretory proteins devoid of additional address tags in their sequence are by default secreted to the external environment. During recent years, a more advanced view of signal peptides has evolved, showing that the functions and immunodominance of certain signal peptides are much more versatile than previously anticipated.

[0154] The compositions described herein may include, for example, nucleic acid sequence (e.g., mRNA) encoding an artificial signal peptide, wherein the signal peptide coding sequence is operably linked to and is in frame with the coding sequence of the antigenic polypeptide, at least one universal T-cell epitope, or any combination thereof. Thus, composition of the present disclosure, in some embodiments, produce an antigenic polypeptide, at least one universal T-cell epitope, or any combination thereof comprising an antigenic polypeptide fused to a signal peptide. In some embodiments, a signal peptide is fused to the N-terminus of the antigenic polypeptide, at least one universal T-cell epitope, or any combination thereof. In some embodiments, a signal peptide is fused to the C-terminus of the antigenic polypeptide, at least one universal T-cell epitope, or any combination thereof.

[0155] In some embodiments, the signal peptide fused to the antigenic polypeptide, at least one universal T-cell epitope, or any combination thereof is an artificial signal peptide. In some embodiments, an artificial signal peptide fused to the antigenic polypeptide encoded by the composition is obtained from an immunoglobulin protein, e.g., an IgE signal peptide or an IgG signal peptide. In some embodiments, a signal peptide fused to the antigenic polypeptide, at least one universal T-cell epitope, or any combination thereof encoded by composition is an Ig heavy chain epsilon-1 signal peptide (IgE HC SP) having the sequence of: MDWTWILFLVAAATRVHS (SEQ ID NO: 16). In some embodiments, a signal peptide fused to the antigenic polypeptide, at least one universal T-cell epitope, or any combination thereof encoded by the composition is an IgGk chain V-III region HAH signal peptide (IgGk SP) having the sequence of METPAQLLFLLLLWLPDTTG (SEQ ID NO: 15). In some embodiments, the signal peptide is selected from: Japanese encephalitis PRM signal sequence (MLGSNSGQRVVFTILLLLVAPAYS: SEQ ID NO: 17), VSVg protein signal sequence (MKCLLYLAFLFIGVNCA; SEQ ID NO: 18) and Japanese encephalitis JEV signal sequence (MWLVSLAIVTACAGA; SEQ ID NO: 19).

[0156] In some embodiments, the antigenic polypeptide encoded by a composition comprises an amino acid sequence identified by any one of SEQ ID NO: 5-8, 12-13, 24-34, 47-50 or 54-56 fused to a signal peptide identified by any one of SEQ ID NO: 15-19. The examples disclosed herein are not meant to be limiting and any signal peptide that is known in the art to facilitate targeting of a protein to ER for processing and/or targeting of a protein to the cell membrane may be used in accordance with the present disclosure.

[0157] A signal peptide may have a length of 15-60 amino acids. For example, a signal peptide may have a length of 15, 16, 17, 18, 19, 20, 21, 22, 23, 24, 25, 26, 27, 28, 29, 30, 31, 32, 33, 34, 35, 36, 37, 38, 39, 40, 41, 42, 43, 44, 45, 46, 47, 48, 49, 50, 51, 52, 53, 54, 55, 56, 57, 58, 59, or 60 amino acids. In some embodiments, a signal peptide has a length of 20-60, 25-60, 30-60, 35-60, 40-60, 45-60, 50-60, 55-60, 15-55, 20-55, 25-55, 30-55, 35-55, 40-55, 45-55, 50-55, 15-50, 20-50, 25-50, 30-50, 35-50, 40-50, 45-50, 15-45, 20-45, 25-45, 30-45, 35-45, 40-45, 15-40, 20-40, 25-40, 30-40, 35-40, 15-35, 20-35, 25-35, 30-35, 15-30, 20-30, 25-30, 15-25, 20-25, or 15-20 amino acids.

[0158] A signal peptide is typically cleaved from the nascent polypeptide at the cleavage junction during ER processing. The mature antigenic polypeptide produce by a composition of the present disclosure typically does not comprise a signal peptide.

### Chemical Modifications

[0159] In some embodiments, antigenic polypeptides encoded by nucleic acid sequence (e.g., mRNA) comprise at least one chemical modification. In some embodiments, T-cell epitope encoded by nucleic acid sequence (e.g., mRNA) comprise at least one chemical modification.

[0160] The terms “chemical modification” and “chemically modified” refer to modification with respect to adenosine (A), guanosine (G), uridine (U), thymidine (T) or cytidine (C) ribonucleosides or deoxyribnucleosides in at least one of their position, pattern, percent or population. Generally, these terms do not refer to the ribonucleotide modifications in naturally occurring 5′-terminal mRNA cap moieties. With respect to a polypeptide, the term “modification” refers to a modification relative to the canonical set 20 amino acids. Polypeptides, as provided herein, are also considered “modified” of they contain amino acid substitutions, insertions or a combination of substitutions and insertions.

[0161] Nucleic acids (e.g., RNA polynucleotides, such as mRNA polynucleotides), in some embodiments, comprise various (more than one) different modifications. In some embodiments, a particular region of a polynucleotide contains one, two or more (optionally different) nucleoside or nucleotide modifications. In some embodiments, a modified RNA polynucleotide (e.g., a modified mRNA polynucleotide), introduced to a cell or organism, exhibits reduced degradation in the cell or organism, respectively, relative to an unmodified polynucleotide. In some embodiments, a modified RNA polynucleotide (e.g., a modified mRNA polynucleotide), introduced into a cell or organism, may exhibit reduced immunogenicity in the cell or organism, respectively (e.g., a reduced innate response).

[0162] Modifications of polynucleotides include, without limitation, those described herein. Nucleic acid sequences (e.g., RNA polynucleotides, such as mRNA polynucleotides) may comprise modifications that are naturally-occurring, non-naturally-occurring or the polynucleotide may comprise a combination of naturally-occurring and non-naturally-occurring modifications. Polynucleotides may include any useful modification, for example, of a sugar, a nucleobase, or an internucleoside linkage (e.g., to a linking phosphate, to a phosphodiester linkage or to the phosphodiester backbone).

[0163] Nucleic acids (e.g., RNA polynucleotides, such as mRNA polynucleotides), in some embodiments, comprise non-natural modified nucleotides that are introduced during synthesis or post-synthesis of the polynucleotides to achieve desired functions or properties. The modifications may be present on an internucleotide linkages, purine or pyrimidine bases, or sugars. The modification may be introduced with chemical synthesis or with a polymerase enzyme at the terminal of a chain or anywhere else in the chain. Any of the regions of a polynucleotide may be chemically modified.

[0164] The present disclosure provides for modified nucleosides and nucleotides of a nucleic acid (e.g., RNA polynucleotides, such as mRNA polynucleotides). A “nucleoside” refers to a compound containing a sugar molecule (e.g., a pentose or ribose) or a derivative thereof in combination with an organic base (e.g., a purine or pyrimidine) or a derivative thereof (also referred to herein as “nucleobase”). A nucleotide” refers to a nucleoside, including a phosphate group. Modified nucleotides may by synthesized by any useful method, such as, for example, chemically, enzymatically, or recombinantly, to include one or more modified or non-natural nucleosides. Polynucleotides may comprise a region or regions of linked nucleosides. Such regions may have variable backbone linkages. The linkages may be standard phosphdioester linkages, in which case the polynucleotides would comprise regions of nucleotides.

[0165] Modified nucleotide base pairing encompasses not only the standard adenosine-thymine, adenosine-uracil, or guanosine-cytosine base pairs, but also base pairs formed between nucleotides and/or modified nucleotides comprising non-standard or modified bases, wherein the arrangement of hydrogen bond donors and hydrogen bond acceptors permits hydrogen bonding between a non-standard base and a standard base or between two complementary non-standard base structures. One example of such non-standard base pairing is the base pairing between the modified nucleotide inosine and adenine, cytosine or uracil. Any combination of base/sugar or linker may be incorporated into polynucleotides of the present disclosure.

[0166] Modifications of nucleic acids (e.g., RNA polynucleotides, such as mRNA polynucleotides) that are useful in the composition of the present disclosure include, but are not limited to the following: 2-methylthio-N6-(cis-hydroxyisopentenyl)adenosine; 2-methylthio-N6-methyladenosine; 2-methylthio-N6-threonyl carbamoyladenosine; N6-glycinylcarbamoyladenosine; N6-isopentenyladenosine; N6-methyladenosine; N6-threonylcarbamoyladeno sine; 1,2′-O-dimethyladenosine; 1-methyladenosine; 2′-O-methyladenosine; 2′-O-ribosyladenosine (phosphate); 2-methyladenosine; 2-methylthio-N6 isopentenyladenosine; 2-methylthio-N6-hydroxynorvalyl carbamoyladenosine; 2′-O-methyladenosine; 2′-O-ribosyladenosine (phosphate); Isopentenyladenosine; N6-(cis-hydroxyisopentenyl)adenosine; N6,2′-O-dimethyladenosine; N6,2′-O-dimethyladenosine; N6,N6,2′-O-trimethyladenosine; N6,N6-dimethyladenosine; N6-acetyladenosine; N6-hydroxynorvalylcarbamoyladenosine; N6-methyl-N6-threonylcarbamoyladenosine; 2-methyladenosine; 2-methylthio-N6-isopentenyladenosine; 7-deaza-adenosine; N1-methyl-adenosine; N6,N6 (dimethyl)adenine; N6-cis-hydroxy-isopentenyl-adenosine; a-thio-adenosine; 2 (amino)adenine; 2 (aminopropyl)adenine; 2 (methylthio) N6 (isopentenyl)adenine; 2-(alkyl)adenine; 2-(aminoalkyl)adenine; 2-(aminopropyl)adenine; 2-(halo)adenine; 2-(halo)adenine; 2-(propyl)adenine; 2′-Amino-2′-deoxy-ATP; 2′-Azido-2′-deoxy-ATP: 2′-Deoxy-2′-a-aminoadenosine TP; 2′-Deoxy-2′-a-azidoadenosine TP; 6 (alkyl)adenine; 6 (methyl)adenine: 6-(alkyl)adenine; 6-(methyl)adenine; 7 (deaza)adenine; 8 (alkenyl)adenine; 8 (alkynyl)adenine; 8 (amino)adenine; 8 (thioalkyl)adenine; 8-(alkenyl)adenine; 8-(alkyl)adenine; 8-(alkynyl)adenine; 8-(amino)adenine; 8-(halo)adenine; 8-(hydroxyl)adenine; 8-(thioalkyl)adenine; 8-(thiol)adenine; 8-azido-adeno sine; aza adenine; deaza adenine; N6 (methyl)adenine; N6-(isopentyl)adenine; 7-deaza-8-aza-adenosine; 7-methyladenine; 1-Deazaadenosine TP; 2′Fluoro-N6-Bz-deoxyadenosine TP: 2′-OMe-2-Amino-ATP; 2′O-methyl-N6-Bz-deoxyadenosine TP; 2′-a-Ethynyladenosine TP; 2-aminoadenine; 2-Aminoadenosine TP; 2-Amino-ATP; 2′-a-Trifluoromethyladenosine TP; 2-Azidoadenosine TP; 2′-b-Ethynyladenosine TP; 2-Bromoadenosine TP: 2′-b-Trifluoromethyladenosine TP; 2-Chloroadenosine TP; 2′-Deoxy-2′,2′-difluoroadenosine TP; 2′-Deoxy-2′-a-mercaptoadenosine TP; 2′-Deoxy-2′-a-thiomethoxyadenosine TP; 2′-Deoxy-2′-b-aminoadenosine TP; 2′-Deoxy-2′-b-azidoadenosine TP: 2′-Deoxy-2′-b-bromoadenosine TP; 2′-Deoxy-2′-b-chloroadenosine TP; 2′-Deoxy-2′-b-fluoroadenosine TP; 2′-Deoxy-2′-b-iodoadenosine TP; 2′-Deoxy-2′-b-mercaptoadenosine TP; 2′-Deoxy-2′-b-thiomethoxyadenosine TP; 2-Fluoroadenosine TP; 2-Iodoadenosine TP; 2-Mercaptoadenosine TP; 2-methoxy-adenine; 2-methylthio-adenine; 2-Trifluoromethyladenosine TP; 3-Deaza-3-bromoadenosine TP; 3-Deaza-3-chloroadenosine TP: 3-Deaza-3-fluoroadenosine TP; 3-Deaza-3-iodoadenosine TP; 3-Deazaadenosine TP; 4′-Azidoadenosine TP; 4′-Carbocyclic adenosine TP; 4′-Ethynyladenosine TP; 5′-Homo-adenosine TP: 8-Aza-ATP; 8-bromo-adenosine TP; 8-Trifluoromethyladenosine TP; 9-Deazaadenosine TP; 2-aminopurine; 7-deaza-2,6-diaminopurine; 7-deaza-8-aza-2,6-diaminopurine; 7-deaza-8-aza-2-aminopurine; 2,6-diaminopurine: 7-deaza-8-aza-adenine, 7-deaza-2-aminopurine; 2-thiocytidine; 3-methylcytidine; 5-formylcytidine; 5-hydroxymethylcytidine; 5-methylcytidine; N4-acetylcytidine; 2′-O-methylcytidine; 2′-O-methylcytidine; 5,2′-O-dimethylcytidine; 5-formyl-2′-O-methylcytidine; Lysidine; N4,2′-O-dimethylcytidine; N4-acetyl-2′-O-methylcytidine; N4-methylcytidine; N4,N4-Dimethyl-2′-OMe-Cytidine TP; 4-methylcytidine; 5-aza-cytidine; Pseudo-iso-cytidine; pyrrolo-cytidine; a-thio-cytidine; 2-(thio)cytosine; 2′-Amino-2′-deoxy-CTP; 2′-Azido-2′-deoxy-CTP; 2′-Deoxy-2′-a-aminocytidine TP; 2′-Deoxy-2′-a-azidocytidine TP; 3 (deaza) 5 (aza)cytosine: 3 (methyl)cytosine; 3-(alkyl)cytosine; 3-(deaza) 5 (aza)cytosine; 3-(methyl) cytidine: 4,2′-O-dimethylcytidine; 5 (halo)cytosine; 5 (methyl)cytosine; 5 (propynyl)cytosine; 5 (trifluoromethyl)cytosine; 5-(alkyl)cytosine; 5-(alkynyl)cytosine; 5-(halo)cytosine: 5-(propynyl)cytosine; 5-(trifluoromethyl)cytosine; 5-bromo-cytidine; 5-iodo-cytidine; 5-propynyl cytosine; 6-(azo)cytosine; 6-aza-cytidine; aza cytosine; deaza cytosine; N4 (acetyl)cytosine; 1-methyl-1-deaza-pseudoisocytidine; 1-methyl-pseudoisocytidine; 2-methoxy-5-methyl-cytidine; 2-methoxy-cytidine; 2-thio-5-methyl-cytidine; 4-methoxy-1-methyl-pseudoisocytidine; 4-methoxy-pseudoisocytidine; 4-thio-1-methyl-1-deaza-pseudoisocytidine; 4-thio-1-methyl-pseudoisocytidine; 4-thio-pseudoisocytidine; 5-aza-zebularine; 5-methyl-zebularine; pyrrolo-pseudoisocytidine; Zebularine; (E)-5-(2-Bromo-vinyl) cytidine TP; 2,2′-anhydro-cytidine TP hydrochloride; 2′Fluor-N4-Bz-cytidine TP; 2′Fluoro-N4-Acetyl-cytidine TP; 2′-O-Methyl-N4-Acetyl-cytidine TP; 2′O-methyl-N4-Bz-cytidine TP; 2′-a-Ethynylcytidine TP; 2′-a-Trifluoromethylcytidine TP; 2′-b-Ethynylcytidine TP; 2′-b-Trifluoromethylcytidine TP; 2′-Deoxy-2′,2′-difluorocytidine TP; 2′-Deoxy-2′-a-mercaptocytidine TP; 2′-Deoxy-2′-a-thiomethoxycytidine TP; 2′-Deoxy-2′-b-aminocytidine TP; 2′-Deoxy-2′-b-azidocytidine TP; 2′-Deoxy-2′-b-bromocytidine TP; 2′-Deoxy-2′-b-chlorocytidine TP; 2′-Deoxy-2′-b-fluorocytidine TP; 2′-Deoxy-2′-b-iodocytidine TP; 2′-Deoxy-2′-b-mercaptocytidine TP; 2′-Deoxy-2′-b-thiomethoxycytidine TP; 2′-O-Methyl-5-(1-propynyl) cytidine TP; 3′-Ethynylcytidine TP; 4′-Azidocytidine TP; 4′-Carbocyclic cytidine TP; 4′-Ethynylcytidine TP; 5-(1-Propynyl)ara-cytidine TP; 5-(2-Chloro-phenyl)-2-thiocytidine TP; 5-(4-Amino-phenyl)-2-thiocytidine TP; 5-Aminoallyl-CTP; 5-Cyanocytidine TP; 5-Ethynylara-cytidine TP; 5-Ethynylcytidine TP; 5′-Homo-cytidine TP; 5-Methoxycytidine TP; 5-Trifluoromethyl-Cytidine TP; N4-Amino-cytidine TP; N4-Benzoyl-cytidine TP; Pseudoisocytidine; 7-methylguanosine; N2,2′-O-dimethylguanosine; N2-methylguanosine; Wyosine; 1,2′-O-dimethylguanosine; 1-methylguanosine; 2′-O)-methylguanosine; 2′-0)-ribosylguanosine (phosphate); 2′-O-methylguanosine: 2′-O-ribosylguanosine (phosphate); 7-aminomethyl-7-deazaguanosine; 7-cyano-7-deazaguanosine; Archaeosine; Methylwyo sine; N2,7-dimethylguanosine; N2,N2,2′-O-trimethylguanosine; N2,N2,7-trimethylguanosine; N2,N2-dimethylguanosine; N2,7,2′-O-trimethylguanosine; 6-thio-guanosine: 7-deaza-guanosine; 8-oxo-guanosine; N1-methyl-guanosine; a-thio-guanosine; 2 (propyl)guanine; 2-(alkyl)guanine; 2′-Amino-2′-deoxy-GTP; 2′-Azido-2′-deoxy-GTP; 2′-Deoxy-2′-a-aminoguanosine TP; 2′-Deoxy-2′-a-azidoguanosine TP; 6 (methyl)guanine; 6-(alkyl)guanine; 6-(methyl)guanine; 6-methyl-guanosine; 7 (alkyl)guanine; 7 (deaza)guanine; 7 (methyl)guanine; 7-(alkyl)guanine; 7-(deaza)guanine; 7-(methyl)guanine; 8 (alkyl)guanine; 8 (alkynyl)guanine; 8 (halo)guanine; 8 (thioalkyl)guanine; 8-(alkenyl)guanine; 8-(alkyl)guanine; 8-(alkynyl)guanine; 8-(amino)guanine; 8-(halo)guanine; 8-(hydroxyl)guanine; 8-(thioalkyl)guanine; 8-(thiol)guanine; aza guanine; deaza guanine; N(methyl)guanine; N-(methyl)guanine; 1-methyl-6-thio-guanosine; 6-methoxy-guanosine; 6-thio-7-deaza-8-aza-guanosine; 6-thio-7-deaza-guanosine; 6-thio-7-methyl-guanosine; 7-deaza-8-aza-guanosine; 7-methyl-8-oxo-guanosine; N2,N2-dimethyl-6-thio-guanosine; N2-methyl-6-thio-guanosine; 1-Me-GTP; 2′Fluoro-N2-isobutyl-guanosine TP; 2′O-methyl-N2-isobutyl-guanosine TP; 2′-a-Ethynylguanosine TP; 2′-a-Trifluoromethylguanosine TP; 2′-b-Ethynylguano sine TP; 2′-b-Trifluoromethylguanosine TP; 2′-Deoxy-2′,2′-difluoroguanosine TP; 2′-Deoxy-2′-a-mercaptoguanosine TP; 2′-Deoxy-2′-a-thiomethoxyguanosine TP; 2′-Deoxy-2′-b-aminoguanosine TP; 2′-Deoxy-2′-b-azidoguanosine TP; 2′-Deoxy-2′-b-bromoguanosine TP; 2′-Deoxy-2′-b-chloroguanosine TP; 2′-Deoxy-2′-b-fluoroguanosine TP; 2′-Deoxy-2′-b-iodoguanosine TP; 2′-Deoxy-2′-b-mercaptoguanosine TP; 2′-Deoxy-2′-b-thiomethoxyguanosine TP; 4′-Azidoguanosine TP; 4′-Carbocyclic guanosine TP; 4′-Ethynylguanosine TP; 5′-Homo-guanosine TP; 8-bromo-guanosine TP; 9-Deazaguanosine TP; N2-isobutyl-guanosine TP; 1-methylinosine; Inosine; 1,2′-O-dimethylinosine; 2′-O-methylinosine; 7-methylinosine; 2′-O-methylinosine; Epoxyqueuosine; galactosyl-queuosine; Mannosylqueuosine; Queuosine; allyamino-thymidine; aza thymidine; deaza thymidine; deoxy-thymidine; 2′-O-methyluridine; 2-thiouridine; 3-methyluridine; 5-carboxymethyluridine; 5-hydroxyuridine; 5-methyluridine; 5-taurinomethyl-2-thiouridine; 5-taurinomethyluridine; Dihydrouridine; Pseudouridine; (3-(3-amino-3-carboxypropyl)uridine; 1-methyl-3-(3-amino-5-carboxypropyl)pseudouridine; 1-methylpseduouridine; 1-methyl-pseudouridine; 2′-O-methyluridine; 2′-O-methylpseudouridine; 2′-O-methyluridine; 2-thio-2′-O-methyluridine; 3-(3-amino-3-carboxypropyl)uridine; 3,2′-O-dimethyluridine; 3-Methyl-pseudo-Uridine TP; 4-thiouridine; 5-(carboxyhydroxymethyl)uridine; 5-(carboxyhydroxymethyl)uridine methyl ester; 5,2′-O-dimethyluridine; 5,6-dihydro-uridine; 5-aminomethyl-2-thiouridine; 5-carbamoylmethyl-2′-O-methyluridine; 5-carbamoylmethyluridine; 5-carboxyhydroxymethyluridine; 5-carboxyhydroxymethyluridine methyl ester; 5-carboxymethylaminomethyl-2′-O-methyluridine; 5-carboxymethylaminomethyl-2-thiouridine; 5-carboxymethylaminomethyl-2-thiouridine; 5-carboxymethylaminomethyluridine; 5-carboxymethylaminomethyluridine: 5-Carbamoylmethyluridine TP: 5-methoxycarbonylmethyl-2′-O-methyluridine; 5-methoxycarbonylmethyl-2-thiouridine; 5-methoxycarbonylmethyluridine; 5-methoxyuridine; 5-methyl-2-thiouridine; 5-methylaminomethyl-2-selenouridine; 5-methylaminomethyl-2-thiouridine; 5-methylaminomethyluridine; 5-Methyldihydrouridine; 5-Oxyacetic acid-Uridine TP; 5-Oxyacetic acid-methyl ester-Uridine TP; N1-methyl-pseudo-uridine; uridine 5-oxyacetic acid; uridine 5-oxyacetic acid methyl ester; 3-(3-Amino-3-carboxypropyl)-Uridine TP; 5-(iso-Pentenylaminomethyl)-2-thiouridine TP; 5-(iso-Pentenylaminomethyl)-2′-O-methyluridine TP; 5-(iso-Pentenylaminomethyl)uridine TP; 5-propynyl uracil; a-thio-uridine; 1 (aminoalkylamino-carbonylethylenyl)-2 (thio)-pseudouracil; 1 (aminoalkylaminocarbonylethylenyl)-2,4-(dithio)pseudouracil; 1 (aminoalkylaminocarbonylethylenyl)-4 (thio)pseudouracil; 1 (aminoalkylaminocarbonylethylenyl)-pseudouracil; 1 (aminocarbonylethylenyl)-2 (thio)-pseudouracil; 1 (aminocarbonylethylenyl)-2,4-(dithio)pseudouracil; 1 (aminocarbonylethylenyl)-4 (thio)pseudouracil; 1 (aminocarbonylethylenyl)-pseudouracil; 1 substituted 2 (thio)-pseudouracil; 1 substituted 2,4-(dithio)pseudouracil; 1 substituted 4 (thio)pseudouracil; 1 substituted pseudouracil; 1-(aminoalkylamino-carbonylethylenyl)-2-(thio)-pseudouracil; 1-Methyl-3-(3-amino-3-carboxypropyl)pseudouridine TP; 1-Methyl-3-(3-amino-3-carboxypropyl)pseudo-UTP; 1-Methyl-pseudo-UTP; 2 (thio)pseudouracil; 2′ deoxy uridine; 2′ fluorouridine; 2-(thio)uracil; 2,4-(dithio)psuedouracil; 2′ methyl, 2′amino, 2′azido, 2′fluro-guanosine; 2′-Amino-2′-deoxy-UTP: 2′-Azido-2′-deoxy-UTP; 2′-Azido-deoxyuridine TP; 2′-O-methylpseudouridine; 2′ deoxy uridine; 2′ fluorouridine; 2′-Deoxy-2′-a-aminouridine TP; 2′-Deoxy-2′-a-azidouridine TP; 2-methylpseudouridine; 3 (3 amino-3 carboxypropyl)uracil; 4 (thio)pseudouracil; 4-(thio)pseudouracil; 4-(thio)uracil; 4-thiouracil; 5 (1,3-diazole-1-alkyl)uracil; 5 (2-aminopropyl)uracil; 5 (aminoalkyl)uracil; 5 (dimethylaminoalkyl)uracil; 5 (guanidiniumalkyl)uracil; 5 (methoxycarbonylmethyl)-2-(thio)uracil; 5 (methoxycarbonyl-methyl)uracil; 5 (methyl) 2 (thio)uracil; 5 (methyl) 2,4 (dithio)uracil; 5 (methyl) 4 (thio)uracil; 5 (methylaminomethyl)-2 (thio)uracil; 5 (methylaminomethyl)-4 (thio)uracil; 5 (methylaminomethyl)-2,4 (dithio)uracil; 5 (propynyl)uracil; 5 (trifluoromethyl)uracil; 5-(2-aminopropyl)uracil; 5-(alkyl)-2-(thio)pseudouracil; 5-(alkyl)-2,4 (dithio)pseudouracil; 5-(alkyl)-4 (thio)pseudouracil; 5-(alkyl)pseudouracil; 5-(alkyl)uracil; 5-(alkynyl)uracil; 5-(allylamino)uracil; 5-(cyanoalkyl)uracil; 5-(dialkylaminoalkyl)uracil; 5-(dimethylaminoalkyl)uracil; 5-(guanidiniumalkyl)uracil; 5-(halo)uracil; 5-(1,3-diazole-1-alkyl)uracil; 5-(methoxy)uracil; 5-(methoxycarbonylmethyl)-2-(thio)uracil; 5-(methoxycarbonyl-methyl)uracil; 5-(methyl) 2 (thio)uracil; 5-(methyl) 2,4 (dithio)uracil; 5-(methyl) 4 (thio)uracil; 5-(methyl)-2-(thio)pseudouracil; 5-(methyl)-2,4 (dithio)pseudouracil; 5-(methyl)-4 (thio)pseudouracil; 5-(methyl)pseudouracil; 5-(methylaminomethyl)-2 (thio)uracil; 5-(methylaminomethyl)-2,4 (dithio)uracil; 5-(methylaminomethyl)-4-(thio)uracil; 5-(propynyl)uracil; 5-(trifluoromethyl)uracil; 5-aminoallyl-uridine; 5-bromo-uridine; 5-iodo-uridine; 5-uracil; 6 (azo)uracil; 6-(azo)uracil; 6-aza-uridine; allyamino-uracil; aza uracil; deaza uracil; N3 (methyl)uracil; Pseudo-UTP-1-2-ethanoic acid; Pseudouracil; 4-Thio-pseudo-UTP; 1-carboxymethyl-pseudouridine; 1-methyl-1-deaza-pseudouridine; 1-propynyl-uridine; 1-taurinomethyl-1-methyl-uridine; 1-taurinomethyl-4-thio-uridine; 1-taurinomethyl-pseudouridine; 2-methoxy-4-thio-pseudouridine; 2-thio-1-methyl-1-deaza-pseudouridine; 2-thio-1-methyl-pseudouridine; 2-thio-5-aza-uridine; 2-thio-dihydropseudouridine; 2-thio-dihydrouridine; 2-thio-pseudouridine; 4-methoxy-2-thio-pseudouridine; 4-methoxy-pseudouridine; 4-thio-1-methyl-pseudouridine; 4-thio-pseudouridine; 5-aza-uridine; Dihydropseudouridine; (±) 1-(2-Hydroxypropyl)pseudouridine TP; (2R)-1-(2-Hydroxypropyl)pseudouridine TP; (2S)-1-(2-Hydroxypropyl)pseudouridine TP; (E)-5-(2-Bromo-vinyl)ara-uridine TP; (E)-5-(2-Bromo-vinyl)uridine TP; (Z)-5-(2-Bromo-vinyl)ara-uridine TP; (Z)-5-(2-Bromo-vinyl)uridine TP; 1-(2,2,2-Trifluoroethyl)-pseudo-UTP; 1-(2,2,3,3,3-Pentafluoropropyl)pseudouridine TP; 1-(2,2-Diethoxyethyl)pseudouridine TP; 1-(2,4,6-Trimethylbenzyl)pseudouridine TP; 1-(2,4,6-Trimethyl-benzyl)pseudo-UTP; 1-(2,4,6-Trimethyl-phenyl)pseudo-UTP; 1-(2-Amino-2-carboxyethyl)pseudo-UTP; 1-(2-Amino-ethyl)pseudo-UTP; 1-(2-Hydroxyethyl)pseudouridine TP; 1-(2-Methoxyethyl)pseudouridine TP; 1-(3,4-Bis-trifluoromethoxybenzyl)pseudouridine TP; 1-(3,4-Dimethoxybenzyl)pseudouridine TP; 1-(3-Amino-3-carboxypropyl)pseudo-UTP; 1-(3-Amino-propyl)pseudo-UTP; 1-(3-Cyclopropyl-prop-2-ynyl)pseudouridine TP; 1-(4-Amino-4-carboxybutyl)pseudo-UTP; 1-(4-Amino-benzyl)pseudo-UTP; 1-(4-Amino-butyl)pseudo-UTP; 1-(4-Amino-phenyl)pseudo-UTP; 1-(4-Azidobenzyl)pseudouridine TP; 1-(4-Bromobenzyl)pseudouridine TP; 1-(4-Chlorobenzyl)pseudouridine TP; 1-(4-Fluorobenzyl)pseudouridine TP; 1-(4-Iodobenzyl)pseudouridine TP; 1-(4-Methanesulfonylbenzyl)pseudouridine TP; 1-(4-Methoxybenzyl)pseudouridine TP; 1-(4-Methoxy-benzyl)pseudo-UTP; 1-(4-Methoxy-phenyl)pseudo-UTP; 1-(4-Methylbenzyl)pseudouridine TP; 1-(4-Methyl-benzyl)pseudo-UTP; 1-(4-Nitrobenzyl)pseudouridine TP; 1-(4-Nitro-benzyl)pseudo-UTP; 1 (4-Nitro-phenyl)pseudo-UTP; 1-(4-Thiomethoxybenzyl)pseudouridine TP; 1-(4-Trifluoromethoxybenzyl)pseudouridine TP; 1-(4-Trifluoromethylbenzyl)pseudouridine TP; 1-(5-Amino-pentyl)pseudo-UTP: 1-(6-Amino-hexyl)pseudo-UTP; 1,6-Dimethyl-pseudo-UTP; 1-[3-(2-{2-[2-(2-Aminoethoxy)-ethoxy]-ethoxy}-ethoxy)-propionyl]pseudouridine TP; 1-{3-[2-(2-Aminoethoxy)-ethoxy]-propionyl}pseudouridine TP; 1-Acetylpseudouridine TP; 1-Alkyl-6-(1-propynyl)-pseudo-UTP: 1-Alkyl-6-(2-propynyl)-pseudo-UTP; 1-Alkyl-6-allyl-pseudo-UTP; 1-Alkyl-6-ethynyl-pseudo-UTP; 1-Alkyl-6-homoallyl-pseudo-UTP; 1-Alkyl-6-vinyl-pseudo-UTP: 1-Allylpseudouridine TP; 1-Aminomethyl-pseudo-UTP; 1-Benzoylpseudouridine TP; 1-Benzyloxymethylpseudouridine TP; 1-Benzyl-pseudo-UTP; 1-Biotinyl-PEG2-pseudouridine TP; 1-Biotinylpseudouridine TP; 1-Butyl-pseudo-UTP; 1-Cyanomethylpseudouridine TP; 1-Cyclobutylmethyl-pseudo-UTP; 1-Cyclobutyl-pseudo-UTP; 1-Cycloheptylmethyl-pseudo-UTP; 1-Cycloheptyl-pseudo-UTP; 1-Cyclohexylmethyl-pseudo-UTP: 1-Cyclohexyl-pseudo-UTP; 1-Cyclooctylmethyl-pseudo-UTP; 1-Cyclooctyl-pseudo-UTP; 1-Cyclopentylmethyl-pseudo-UTP; 1-Cyclopentyl-pseudo-UTP; 1-Cyclopropylmethyl-pseudo-UTP: 1-Cyclopropyl-pseudo-UTP; 1-Ethyl-pseudo-UTP; 1-Hexyl-pseudo-UTP; 1-Homoallylpseudouridine TP; 1-Hydroxymethylpseudouridine TP; 1-iso-propyl-pseudo-UTP; 1-Me-2-thio-pseudo-UTP; 1-Me-4-thio-pseudo-UTP; 1-Me-alpha-thio-pseudo-UTP; 1-Methanesulfonylmethylpseudouridine TP; 1-Methoxymethylpseudouridine TP; 1-Methyl-6-(2,2,2-Trifluoroethyl)pseudo-UTP; 1-Methyl-6-(4-morpholino)-pseudo-UTP; 1-Methyl-6-(4-thiomorpholino)-pseudo-UTP; 1-Methyl-6-(substituted phenyl)pseudo-UTP; 1-Methyl-6-amino-pseudo-UTP; 1-Methyl-6-azido-pseudo-UTP; 1-Methyl-6-bromo-pseudo-UTP; 1-Methyl-6-butyl-pseudo-UTP; 1-Methyl-6-chloro-pseudo-UTP; 1-Methyl-6-cyano-pseudo-UTP; 1-Methyl-6-dimethylamino-pseudo-UTP; 1-Methyl-6-ethoxy-pseudo-UTP; 1-Methyl-6-ethylcarboxylate-pseudo-UTP; 1-Methyl-6-ethyl-pseudo-UTP; 1-Methyl-6-fluoro-pseudo-UTP; 1-Methyl-6-formyl-pseudo-UTP; 1-Methyl-6-hydroxyamino-pseudo-UTP; 1-Methyl-6-hydroxy-pseudo-UTP; 1-Methyl-6-iodo-pseudo-UTP; 1-Methyl-6-iso-propyl-pseudo-UTP; 1-Methyl-6-methoxy-pseudo-UTP; 1-Methyl-6-methylamino-pseudo-UTP; 1-Methyl-6-phenyl-pseudo-UTP; 1-Methyl-6-propyl-pseudo-UTP; 1-Methyl-6-tert-butyl-pseudo-UTP; 1-Methyl-6-trifluoromethoxy-pseudo-UTP; 1-Methyl-6-trifluoromethyl-pseudo-UTP; 1-Morpholinomethylpseudouridine TP; 1-Pentyl-pseudo-UTP; 1-Phenyl-pseudo-UTP; 1-Pivaloylpseudouridine TP; 1-Propargylpseudouridine TP; 1-Propyl-pseudo-UTP; 1-propynyl-pseudouridine; 1-p-tolyl-pseudo-UTP; 1-tert-Butyl-pseudo-UTP; 1-Thiomethoxymethylpseudouridine TP; 1-Thiomorpholinomethylpseudouridine TP; 1-Trifluoroacetylpseudouridine TP; 1-Trifluoromethyl-pseudo-UTP; 1-Vinylpseudouridine TP; 2,2′-anhydro-uridine TP; 2′-bromo-deoxyuridine TP; 2′-F-5-Methyl-2′-deoxy-UTP; 2′-OMe-5-Me-UTP; 2′-OMe-pseudo-UTP; 2′-a-Ethynyluridine TP; 2′-a-Trifluoromethyluridine TP; 2′-b-Ethynyluridine TP; 2′-b-Trifluoromethyluridine TP; 2′-Deoxy-2′,2′-difluorouridine TP; 2′-Deoxy-2′-a-mercaptouridine TP; 2′-Deoxy-2′-a-thiomethoxyuridine TP; 2′-Deoxy-2′-b-aminouridine TP; 2′-Deoxy-2′-b-azidouridine TP; 2′-Deoxy-2′-b-bromouridine TP; 2′-Deoxy-2′-b-chlorouridine TP; 2′-Deoxy-2′-b-fluorouridine TP; 2′-Deoxy-2′-b-iodouridine TP; 2′-Deoxy-2′-b-mercaptouridine TP; 2′-Deoxy-2′-b-thiomethoxyuridine TP; 2-methoxy-4-thio-uridine; 2-methoxyuridine; 2′-O-Methyl-5-(1-propynyl)uridine TP; 3-Alkyl-pseudo-UTP; 4′-Azidouridine TP: 4′-Carbocyclic uridine TP; 4′-Ethynyluridine TP; 5-(1-Propynyl)ara-uridine TP; 5-(2-Furanyl)uridine TP; 5-Cyanouridine TP; 5-Dimethylaminouridine TP; 5′-Homo-uridine TP; 5-iodo-2′-fluoro-deoxyuridine TP; 5-Phenylethynyluridine TP; 5-Trideuteromethyl-6-deuterouridine TP; 5-Trifluoromethyl-Uridine TP; 5-Vinylarauridine TP; 6-(2,2,2-Trifluoroethyl)-pseudo-UTP; 6-(4-Morpholino)-pseudo-UTP; 6-(4-Thiomorpholino)-pseudo-UTP; 6-(Substituted-Phenyl)-pseudo-UTP; 6-Amino-pseudo-UTP; 6-Azido-pseudo-UTP; 6-Bromo-pseudo-UTP; 6-Butyl-pseudo-UTP; 6-Chloro-pseudo-UTP; 6-Cyano-pseudo-UTP; 6-Dimethylamino-pseudo-UTP; 6-Ethoxy-pseudo-UTP; 6-Ethylcarboxylate-pseudo-UTP; 6-Ethyl-pseudo-UTP; 6-Fluoro-pseudo-UTP; 6-Formyl-pseudo-UTP; 6-Hydroxyamino-pseudo-UTP; 6-Hydroxy-pseudo-UTP; 6-Iodo-pseudo-UTP; 6-iso-Propyl-pseudo-UTP; 6-Methoxy-pseudo-UTP; 6-Methylamino-pseudo-UTP; 6-Methyl-pseudo-UTP; 6-Phenyl-pseudo-UTP; 6-Phenyl-pseudo-UTP; 6-Propyl-pseudo-UTP; 6-tert-Butyl-pseudo-UTP; 6-Trifluoromethoxy-pseudo-UTP; 6-Trifluoromethyl-pseudo-UTP; Alpha-thio-pseudo-UTP; Pseudouridine 1-(4-methylbenzenesulfonic acid) TP; Pseudouridine 1-(4-methylbenzoic acid) TP; Pseudouridine TP 1-[3-(2-ethoxy)]propionic acid; Pseudouridine TP 1-[3-{2-(2-[2-(2-ethoxy)-ethoxy]-ethoxy)-ethoxy}]propionic acid; Pseudouridine TP 1-[3-{2-(2-[2-{2 (2-ethoxy)-ethoxy}-ethoxy]-ethoxy)-ethoxy}]propionic acid; Pseudouridine TP 1-[3-{2-(2-[2-ethoxy]-ethoxy)-ethoxy}]propionic acid: Pseudouridine TP 1-[3-{2-(2-ethoxy)-ethoxy}]propionic acid; Pseudouridine TP 1-methylphosphonic acid; Pseudouridine TP 1-methylphosphonic acid diethyl ester; Pseudo-UTP-N1-3-propionic acid; Pseudo-UTP-N1-4-butanoic acid; Pseudo-UTP-N1-5-pentanoic acid; Pseudo-UTP-N1-6-hexanoic acid; Pseudo-UTP-N1-7-heptanoic acid; Pseudo-UTP-N1-methyl-p-benzoic acid; Pseudo-UTP-N1-p-benzoic acid; Wybutosine; Hydroxywybutosine; Isowyosine; Peroxywybutosine; undermodified hydroxywybutosine; 4-demethylwyosine; 2,6-(diamino) purine; 1-(aza)-2-(thio)-3-(aza)-phenoxazin-1-yl: 1,3-(diaza)-2-(oxo)-phenthiazin-1-yl; 1,3-(diaza)-2-(oxo)-phenoxazin-1-yl; 1,3,5-(triaza)-2,6-(dioxa)-naphthalene; 2 (amino) purine; 2,4,5-(trimethyl)phenyl; 2′ methyl, 2′amino, 2′azido, 2′fluro-cytidine; 2′ methyl, 2′amino, 2′azido, 2′fluro-adenine; 2′methyl, 2′amino, 2′azido, 2′fluro-uridine; 2′-amino-2′-deoxyribose; 2-amino-6-Chloro-purine; 2-aza-inosinyl; 2′-azido-2′-deoxyribose; 2′fluoro-2′-deoxyribose; 2′-fluoro-modified bases; 2′-O-methyl-ribose; 2-oxo-7-aminopyridopyrimidin-3-yl; 2-oxo-pyridopyrimidine-3-yl; 2-pyridinone; 3 nitropyrrole; 3-(methyl)-7-(propynyl) isocarbostyrilyl; 3-(methyl) isocarbostyrilyl; 4-(fluoro)-6-(methyl)benzimidazole; 4-(methyl)benzimidazole; 4-(methyl) indolyl: 4,6-(dimethyl) indolyl; 5 nitroindole; 5 substituted pyrimidines; 5-(methyl) isocarbostyrilyl; 5-nitroindole; 6-(aza)pyrimidine; 6-(azo) thymine; 6-(methyl)-7-(aza) indolyl; 6-chloro-purine; 6-phenyl-pyrrolo-pyrimidin-2-on-3-yl; 7-(aminoalkylhydroxy)-1-(aza)-2-(thio)-3-(aza)-phenthiazin-1-yl; 7-(aminoalkylhydroxy)-1-(aza)-2-(thio)-3-(aza)-phenoxazin-1-yl; 7-(aminoalkylhydroxy)-1,3-(diaza)-2-(oxo)-phenoxazin-1-yl; 7-(aminoalkylhydroxy)-1,3-(diaza)-2-(oxo)-phenthiazin-1-yl; 7-(aminoalkylhydroxy)-1,3-(diaza)-2-(oxo)-phenoxazin-1-yl; 7-(aza) indolyl; 7-(guanidiniumalkylhydroxy)-1-(aza)-2-(thio)-3-(aza)-phenoxazinl-yl; 7-(guanidiniumalkylhydroxy)-1-(aza)-2-(thio)-3-(aza)-phenthiazin-1-yl; 7-(guanidiniumalkylhydroxy)-1-(aza)-2-(thio)-3-(aza)-phenoxazin-1-yl; 7-(guanidiniumalkylhydroxy)-1,3-(diaza)-2-(oxo)-phenoxazin-1-yl; 7-(guanidiniumalkyl-hydroxy)-1,3-(diaza)-2-(oxo)-phenthiazin-1-yl; 7-(guanidiniumalkylhydroxy)-1,3-(diaza)-2-(oxo)-phenoxazin-1-yl; 7-(propynyl) isocarbostyrilyl; 7-(propynyl) isocarbostyrilyl, propynyl-7-(aza) indolyl; 7-deaza-inosinyl; 7-substituted 1-(aza)-2-(thio)-3-(aza)-phenoxazin-1-yl; 7-substituted 1.3-(diaza)-2-(oxo)-phenoxazin-1-yl; 9-(methyl)-imidizopyridinyl; Aminoindolyl; Anthracenyl; bis-ortho-(aminoalkylhydroxy)-6-phenyl-pyrrolo-pyrimidin-2-on-3-yl; bis-ortho-substituted-6-phenyl-pyrrolo-pyrimidin-2-on-3-yl; Difluorotolyl; Hypoxanthine; Imidizopyridinyl; Inosinyl; Isocarbostyrilyl; Isoguanisine; N2-substituted purines; N6-methyl-2-amino-purine; N6-substituted purines; N-alkylated derivative; Napthalenyl; Nitrobenzimidazolyl; Nitroimidazolyl; Nitroindazolyl; Nitropyrazolyl; Nubularine; 06-substituted purines; O-alkylated derivative; ortho-(aminoalkylhydroxy)-6-phenyl-pyrrolo-pyrimidin-2-on-3-yl; ortho-substituted-6-phenyl-pyrrolo-pyrimidin-2-on-3-yl; Oxoformycin TP; para-(aminoalkylhydroxy)-6-phenyl-pyrrolo-pyrimidin-2-on-3-yl; para-substituted-6-phenyl-pyrrolo-pyrimidin-2-on-3-yl; Pentacenyl; Phenanthracenyl; Phenyl; propynyl-7-(aza) indolyl; Pyrenyl; pyridopyrimidin-3-yl; pyridopyrimidin-3-yl, 2-oxo-7-amino-pyridopyrimidin-3-yl; pyrrolo-pyrimidin-2-on-3-yl; Pyrrolopyrimidinyl; Pyrrolopyrizinyl; Stilbenzyl; substituted 1,2,4-triazoles; Tetracenyl; Tubercidine; Xanthine; Xanthosine-5′-TP; 2-thio-zebularine; 5-aza-2-thio-zebularine; 7-deaza-2-amino-purine; pyridin-4-one ribonucleoside; 2-Amino-riboside-TP: Formycin A TP; Formycin B TP; Pyrrolosine TP; 2′-OH-ara-adenosine TP; 2′-OH-ara-cytidine TP: 2′-OH-ara-uridine TP; 2′-OH-ara-guanosine TP; 5-(2-carbomethoxyvinyl)uridine TP; and N6-(19-Amino-pentaoxanonadecyl)adenosine TP.

[0167] In some embodiments, nucleic acids (e.g., RNA polynucleotides, such as mRNA polynucleotides) include a combination of at least two (e.g., 2, 3, 4 or more) of the aforementioned modified nucleobases.

[0168] In some embodiments, modified nucleobases in nucleic acids (e.g., RNA polynucleotides, such as mRNA polynucleotides) are selected from the group consisting of pseudouridine (ψ), N1-methylpseudouridine (mψ¹), N1-ethylpseudouridine, 2-thiouridine, 4′-thiouridine, 5-methylcytosine, 2-thio-1-methyl-1-deaza-pseudouridine, 2-thio-1-methyl-pseudouridine, 2-thio-5-aza-uridine, 2-thio-dihydropseudouridine, 2-thio-dihydrouridine, 2-thio-pseudouridine, 4-methoxy-2-thio-pseudouridine, 4-methoxy-pseudouridine, 4-thio-1-methyl-pseudouridine, 4-thio-pseudouridine, 5-aza-uridine, dihydropseudouridine, 5-methoxyuridine and 2′-O-methyl uridine. In some embodiments, nucleic acids (e.g., RNA polynucleotides, such as mRNA polynucleotides) include a combination of at least two (e.g., 2, 3, 4 or more) of the aforementioned modified nucleobases.

[0169] In some embodiments, modified nucleobases in nucleic acids (e.g., RNA polynucleotides, such as mRNA polynucleotides) are selected from the group consisting of 1-methyl-pseudouridine (mψ¹), 5-methoxy-uridine (mo⁵U), 5-methyl-cytidine (m⁵C), pseudouridine (ψ), α-thio-guanosine and α-thio-adenosine. In some embodiments, nucleic acid includes a combination of at least two (e.g., 2, 3, 4 or more) of the aforementioned modified nucleobases.

[0170] In some embodiments, nucleic acids (e.g., RNA polynucleotides, such as mRNA polynucleotides) comprise pseudouridine (ψ) and 5-methyl-cytidine (m⁵C). In some embodiments, nucleic acids (e.g., RNA polynucleotides, such as mRNA polynucleotides) comprise 1-methyl-pseudouridine (mψ¹). In some embodiments, nucleic acids (e.g., RNA polynucleotides, such as mRNA polynucleotides) comprise 1-methyl-pseudouridine (mψ¹) and 5-methyl-cytidine (m⁵C). In some embodiments, nucleic acids (e.g., RNA polynucleotides, such as mRNA polynucleotides) comprise 2-thiouridine (s²U). In some embodiments, nucleic acids (e.g., RNA polynucleotides, such as mRNA polynucleotides) comprise 2-thiouridine and 5-methyl-cytidine (m⁵C). In some embodiments, nucleic acids (e.g., RNA polynucleotides, such as mRNA polynucleotides) comprise methoxy-uridine (mo⁵U). In some embodiments, nucleic acids (e.g., RNA polynucleotides, such as mRNA polynucleotides) comprise 5-methoxy-uridine (mo⁵U) and 5-methyl-cytidine (m⁵C). In some embodiments, nucleic acids (e.g., RNA polynucleotides, such as mRNA polynucleotides) comprise 2′-O-methyl uridine. In some embodiments, nucleic acids (e.g., RNA polynucleotides, such as mRNA polynucleotides) comprise 2′-O-methyl uridine and 5-methyl-cytidine (m⁵C). In some embodiments, nucleic acids (e.g., RNA polynucleotides, such as mRNA polynucleotides) comprise N6-methyl-adenosine (m⁶A). In some embodiments, nucleic acids (e.g., RNA polynucleotides, such as mRNA polynucleotides) comprise N6-methyl-adenosine (m⁶A) and 5-methyl-cytidine (m⁵C).

[0171] In some embodiments, nucleic acids (e.g., RNA polynucleotides, such as mRNA polynucleotides) are uniformly modified (e.g., fully modified, modified throughout the entire sequence) for a particular modification. For example, a nucleic acids can be uniformly modified with 5-methyl-cytidine (m⁵C), meaning that all cytosine residues in the mRNA sequence are replaced with 5-methyl-cytidine (m⁵C). Similarly, a nucleic acid can be uniformly modified for any type of nucleoside residue present in the sequence by replacement with a modified residue such as those set forth above.

[0172] Exemplary nucleobases and nucleosides having a modified cytosine include N4-acetyl-cytidine (ac4C), 5-methyl-cytidine (m5C), 5-halo-cytidine (e.g., 5-iodo-cytidine), 5-hydroxymethyl-cytidine (hm5C), 1-methyl-pseudoisocytidine, 2-thio-cytidine (s2C), and 2-thio-5-methyl-cytidine.

[0173] In some embodiments, a modified nucleobase is a modified uridine. Exemplary nucleobases and in some embodiments, a modified nucleobase is a modified cytosine. nucleosides having a modified uridine include 5-cyano uridine, and 4′-thio uridine.

[0174] In some embodiments, a modified nucleobase is a modified adenine. Exemplary nucleobases and nucleosides having a modified adenine include 7-deaza-adenine, 1-methyl-adenosine (m1A), 2-methyl-adenine (m2A), and N6-methyl-adenosine (m⁶A).

[0175] In some embodiments, a modified nucleobase is a modified guanine. Exemplary nucleobases and nucleosides having a modified guanine include inosine (I), 1-methyl-inosine (m1I), wyosine (imG), methylwyosine (mimG), 7-deaza-guanosine, 7-cyano-7-deaza-guanosine (preQ0), 7-aminomethyl-7-deaza-guanosine (preQ1), 7-methyl-guanosine (m7G), 1-methyl-guanosine (m1G), 8-oxo-guanosine, 7-methyl-8-oxo-guanosine.

[0176] The nucleic acids described herein may be partially or fully modified along the entire length of the molecule. For example, one or more or all or a given type of nucleotide (e.g., purine or pyrimidine, or any one or more or all of A, G, U, C) may be uniformly modified in a polynucleotide of the disclosure, or in a given predetermined sequence region thereof (e.g., in the mRNA including or excluding the polyA tail). In some embodiments, all nucleotides X in a polynucleotide of the present disclosure (or in a given sequence region thereof) are modified nucleotides, wherein X may any one of nucleotides A. G, U, C, or any one of the combinations A+G, A+U, A+C, G+U, G+C, U+C, A+G+U, A+G+C, G+U+C or A+G+C.

[0177] The nucleic acids may contain from about 1% to about 100% modified nucleotides (either in relation to overall nucleotide content, or in relation to one or more types of nucleotide, i.e., any one or more of A, G, U or C) or any intervening percentage (e.g., from 1% to 20%, from 1% to 25%, from 1% to 50%, from 1% to 60%, from 1% to 70%, from 1% to 80%, from 1% to 90%, from 1% to 95%, from 10% to 20%, from 10% to 25%, from 10% to 50%, from 10% to 60%, from 10% to 70%, from 10% to 80%, from 10% to 90%, from 10% to 95%, from 10% to 100%, from 20% to 25%, from 20% to 50%, from 20% to 60%, from 20% to 70%, from 20% to 80%, from 20% to 90%, from 20% to 95%, from 20% to 100%, from 50% to 60%, from 50% to 70%, from 50% to 80%, from 50% to 90%, from 50% to 95%, from 50% to 100%, from 70% to 80%, from 70% to 90%, from 70% to 95%, from 70% to 100%, from 80% to 90%, from 80% to 95%, from 80% to 100%, from 90% to 95%, from 90% to 100%, and from 95% to 100%). Any remaining percentage is accounted for by the presence of unmodified A, G, U, or C.

[0178] The nucleic acids may contain at a minimum 1% and at maximum 100% modified nucleotides, or any intervening percentage, such as at least 5% modified nucleotides, at least 10% modified nucleotides, at least 25% modified nucleotides, at least 50% modified nucleotides, at least 80% modified nucleotides, or at least 90% modified nucleotides. For example, the nucleic acid may contain a modified pyrimidine such as a modified uracil or cytosine. In some embodiments, at least 5%, at least 10%, at least 25%, at least 50%, at least 80%, at least 90% or 100% of the uracil in the polynucleotide is replaced with a modified uracil (e.g., a 5-substituted uracil). The modified uracil can be replaced by a compound having a single unique structure, or can be replaced by a plurality of compounds having different structures (e.g., 2, 3, 4 or more unique structures). In some embodiments, at least 5%, at least 10%, at least 25%, at least 50%, at least 80%, at least 90% or 100% of the cytosine in the polynucleotide is replaced with a modified cytosine (e.g., a 5-substituted cytosine). The modified cytosine can be replaced by a compound having a single unique structure, or can be replaced by a plurality of compounds having different structures (e.g., 2, 3, 4 or more unique structures).

[0179] Thus, in some embodiments, the compositions comprise a 5′UTR element, an optionally codon optimized open reading frame, and a 3′UTR element, a poly(A) sequence and/or a polyadenylation signal wherein the RNA is not chemically modified.

[0180] In some embodiments, the modified nucleobase is a modified uracil. Exemplary nucleobases and nucleosides having a modified uracil include pseudouridine (ψ), pyridin-4-one ribonucleoside, 5-aza-uridine, 6-aza-uridine, 2-thio-5-aza-uridine, 2-thio-uridine (s²U), 4-thio-uridine (s⁴U), 4-thio-pseudouridine, 2-thio-pseudouridine, 5-hydroxy-uridine (ho⁵U), 5-aminoallyl-uridine, 5-halo-uridine (e.g., 5-iodo-uridineor 5-bromo-uridine), 3-methyl-uridine (m³U), 5-methoxy-uridine (mo⁵U), uridine 5-oxyacetic acid (cmo⁵U), uridine 5-oxyacetic acid methyl ester (mcmo⁵U), 5-carboxymethyl-uridine (cm⁵U), 1-carboxymethyl-pseudouridine, 5-carboxyhydroxymethyl-uridine (chm⁵U), 5-carboxyhydroxymethyl-uridine methyl ester (mchm³U), 5-methoxycarbonylmethyl-uridine (mcm⁵U), 5-methoxycarbonylmethyl-2-thio-uridine (mcm⁵s²U), 5-aminomethyl-2-thio-uridine (nm⁵s²U), 5-methylaminomethyl-uridine (mnm⁵U), 5-methylaminomethyl-2-thio-uridine (mnm⁵s²U), 5-methylaminomethyl-2-seleno-uridine (mnm³se²U), 5-carbamoylmethyl-uridine (ncm⁵U), 5-carboxymethylaminomethyl-uridine (cmnm⁵U), 5-carboxymethylaminomethyl-2-thio-uridine (cmnm⁵s²U), 5-propynyl-uridine, 1-propynyl-pseudouridine, 5-taurinomethyl-uridine (tm⁵U), 1-taurinomethyl-pseudouridine, 5-taurinomethyl-2-thio-uridine (tm⁵s²U), 1-taurinomethyl-4-thio-pseudouridine, 5-methyl-uridine (m5U, i.e., having the nucleobase deoxythymine), 1-methyl-pseudouridine (mψ¹), 5-methyl-2-thio-uridine (m5s2U), 1-methyl-4-thio-pseudouridine (m¹s⁴y), 4-thio-1-methyl-pseudouridine, 3-methyl-pseudouridine (m3v), 2-thio-1-methyl-pseudouridine, 1-methyl-1-deaza-pseudouridine, 2-thio-1-methyl-1-deaza-pseudouridine, dihydrouridine (D), dihydropseudouridine, 5.6-dihydrouridine, 5-methyldihydrouridine (m5D), 2-thio-dihydrouridine, 2-thio-dihydropseudouridine, 2-methoxy-uridine, 2-methoxy-4-thio-uridine, 4-methoxy-pseudouridine, 4-methoxy-2-thio-pseudouridine, N1-methyl-pseudouridine, 3-(3-amino-3-carboxypropyl)uridine (acp³U), 1-methyl-3-(3-amino-3-carboxypropyl)pseudouridine (acp³ w), 5-(isopentenylaminomethyl)uridine (inm⁵U), 5-(isopentenylaminomethyl)-2-thio-uridine (inm⁵s²U), a-thio-uridine. 2′-O-methyl-uridine (Urn), 5,2′-O-dimethyl-uridine (m5Um), 2′-O-methyl-pseudouridine (ψm), 2-thio-2′-O-methyl-uridine (s²Um), 5-methoxycarbonylmethyl-2′-O-methyl-uridine (mcm⁵Um), 5-carbamoylmethyl-2′-O-methyl-uridine (ncm⁵Um), 5-carboxymethylaminomethyl-2′-O-methyl-uridine (cmnm⁵Um), 3,2′-O-dimethyl-uridine (m3Um). and 5-(isopentenylaminomethyl)-2′-O-methyl-uridine (inm⁵Um), 1-thio-uridine, deoxythymidine, 2′-F-ara-uridine, 2′-F-uridine, 2′-OH-ara-uridine, 5-(2-carbomethoxyvinyl)uridine, and 5-[3-(1-E-propenylamino)]uridine.

[0181] In some embodiments, the modified nucleobase is a modified cytosine. Exemplary nucleobases and nucleosides having a modified cytosine include 5-aza-cytidine, 6-aza-cytidine, pseudoisocytidine, 3-methyl-cytidine (m3C), N4-acetyl-cytidine (ac4C), 5-formylcytidine (f⁵C), N4-methyl-cytidine (m4C), 5-methyl-cytidine (m⁵C), 5-halo-cytidine (e.g., 5-iodo-cytidine), 5-hydroxymethyl-cytidine (hm5° C.), 1-methyl-pseudoisocytidine, pyrrolo-cytidine, pyrrolo-pseudoisocytidine, 2-thio-cytidine (s2C). 2-thio-5-methyl-cytidine, 4-thio-pseudoisocytidine, 4-thio-1-methyl-pseudoisocytidine, 4-thio-1-methyl-1-deaza-pseudoisocytidine, 1-methyl-1-deaza-pseudoisocytidine, zebularine, 5-aza-zebularine, 5-methyl-zebularine, 5-aza-2-thio-zebularine, 2-thio-zebularine, 2-methoxy-cytidine, 2-methoxy-5-methyl-cytidine, 4-methoxy-pseudoisocytidine, 4-methoxy-1-methyl-pseudoisocytidine, lysidine (k₂C), a-thio-cytidine, 2′-O-methyl-cytidine (Cm), 5,2′-O-dimethylcytidine (m⁵Cm), N4-acetyl-2′-O-methyl-cytidine (ac⁴Cm), N4,2′-O-dimethylcytidine (m⁴Cm), 5-formyl-2′-O-methyl-cytidine (f⁵Cm), N4,N4,2′-O-trimethyl-cytidine (m₂⁴Cm), 1-thio-cytidine, 2′-F-ara-cytidine, 2′-F-cytidine, and 2′-OH-ara-cytidine.

[0182] In some embodiments, the modified nucleobase is a modified adenine. Exemplary nucleobases and nucleosides having a modified adenine include 2-amino-purine, 2,6-diaminopurine. 2-amino-6-halo-purine (e.g., 2-amino-6-chloro-purine), 6-halo-purine (e.g., 6-chloro-purine), 2-amino-6-methyl-purine, 8-azido-adenosine, 7-deaza-adenine, 7-deaza-8-aza-adenine, 7-deaza-2-amino-purine, 7-deaza-8-aza-2-amino-purine, 7-deaza-2,6-diaminopurine, 7-deaza-8-aza-2,6-diaminopurine, 1-methyl-adenosine (m¹A), 2-methyl-adenine (m²A), N6-methyl-adenosine (m⁶A), 2-methylthio-N6-methyl-adenosine (ms² m⁶A), N6-isopentenyl-adenosine (i⁶A). 2-methylthio-N6-isopentenyl-adenosine (ms²i⁶A), N6-(cis-hydroxyisopentenyl)adenosine (i⁶A), 2-methylthio-N6-(cis-hydroxyisopentenyl)adenosine (ms²io⁶A), N6-glycinylcarbamoyl-adenosine (g⁶A), N6-threonylcarbamoyl-adenosine (t⁶A), N6-methyl-N6-threonylcarbamoyl-adenosine (m⁶t⁶A), 2-methylthio-N6-threonylcarbamoyl-adenosine (ms²g⁶A), N6,N6-dimethyl-adenosine (m⁶t⁶A), N6-hydroxynorvalylcarbamoyl-adenosine (hn⁶A), 2-methylthio-N6-hydroxynorvalylcarbamoyl-adenosine (ms²hn⁶A), N6-acetyl-adenosine (ac6A), 7-methyl-adenine, 2-methylthio-adenine, 2-methoxy-adenine, a-thio-adenosine, 2′-O-methyl-adenosine (Am), N6,2′-O-dimethyl-adenosine (m6Am), N6,N6,2′-O-trimethyl-adenosine (ms₂⁶Am), 1,2′-O-dimethyl-adenosine (m1Am), 2′-O-ribosyladenosine (phosphate) (Ar(p)), 2-amino-N6-methyl-purine, 1-thio-adenosine, 8-azido-adenosine, 2′-F-ara-adenosine, 2′-F-adenosine, 2′-OH-ara-adenosine, and N6-(19-amino-pentaoxanonadecyl)-adenosine.

[0183] In some embodiments, the modified nucleobase is a modified guanine. Exemplary nucleobases and nucleosides having a modified guanine include inosine (I), 1-methyl-inosine (m¹I), wyosine (imG), methylwyosine (mimG), 4-demethyl-wyosine (imG-14), isowyosine (imG2), wybutosine (yW), peroxywybutosine (o_{2y}W), hydroxywybutosine (OhyW), undermodified hydroxywybutosine (OhyW*), 7-deaza-guanosine, queuosine (Q), epoxyqueuosine (oQ), galactosyl-queuosine (galQ), mannosyl-queuosine (manQ), 7-cyano-7-deaza-guanosine (preQ₀), 7-aminomethyl-7-deaza-guanosine (preQ₁), archaeosine (G±), 7-deaza-8-aza-guanosine, 6-thio-guanosine, 6-thio-7-deaza-guanosine, 6-thio-7-deaza-8-aza-guanosine, 7-methyl-guanosine (m⁷G), 6-thio-7-methyl-guanosine, 7-methyl-inosine, 6-methoxy-guanosine, 1-methyl-guanosine (m¹G), N2-methyl-guanosine (m²G), N2,N2-dimethyl-guanosine (m₂²G), N2,7-dimethyl-guano sine (m^{2,7}G), N2,N2,7-dimethyl-guanosine (m^{2,2,7}G), 8-oxo-guanosine, 7-methyl-8-oxo-guanosine, 1-methyl-6-thio-guanosine, N2-methyl-6-thio-guanosine, N2,N2-dimethyl-6-thio-guanosine, a-thio-guanosine, 2′-O-methyl-guanosine (Gm), N2-methyl-2′-O-methyl-guanosine (m²Gm), N2,N2-dimethyl-2′-O-methyl-guanosine (m₂²Gm), 1-methyl-2′-O-methyl-guanosine (m¹Gm), N2,7-dimethyl-2′-O-methyl-guanosine (m2.7Gm), 2′-O-methyl-inosine (Im), 1,2′-O-dimethyl-inosine (m¹Im), 2′-O-ribosylguanosine (phosphate) (Gr(p)). 1-thio-guanosine. 06-methyl-guanosine, 2′-F-ara-guanosine, and 2′-F-guanosine.

### N-Linked Glycosylation Site Mutants

[0184] N-linked glycans of viral proteins play important roles in modulating the immune response. Glycans can be important for maintaining the appropriate antigenic conformations, shielding potential neutralization epitopes, and may alter the proteolytic susceptibility of proteins. Some viruses have putative N-linked glycosylation sites. Deletion or modification of an N-linked glycosylation site may enhance the immune response. Thus, the present disclosure provides, in some embodiments, compositions comprising nucleic acids (e.g., mRNA) encoding antigenic polypeptides that comprise a deletion or modification at one or more N-linked glycosylation sites.

In Vitro Transcription of RNA (e.g., mRNA)

[0185] Compositions of the present disclosure comprise at least one RNA polynucleotide, such as a mRNA (e.g., modified mRNA). mRNA, for example, is transcribed in vitro from template DNA, referred to as an “in vitro transcription template.” In some embodiments, an in vitro transcription template encodes a 5′ untranslated (UTR) region, contains an open reading frame, and encodes a 3′ UTR and a polyA tail. The particular nucleic acid sequence composition and length of an in vitro transcription template will depend on the mRNA encoded by the template.

[0186] A “5′ untranslated region” (5′UTR) refers to a region of an mRNA that is directly upstream (i.e., 5′) from the start codon (i.e., the first codon of an mRNA transcript translated by a ribosome) that does not encode a polypeptide.

[0187] A “3′ untranslated region” (3′UTR) refers to a region of an mRNA that is directly downstream (i.e., 3′) from the stop codon (i.e., the codon of an mRNA transcript that signals a termination of translation) that does not encode a polypeptide.

[0188] An “open reading frame” is a continuous stretch of DNA beginning with a start codon (e.g., methionine (ATG)), and ending with a stop codon (e.g., TAA, TAG or TGA) and encodes a polypeptide.

[0189] A “polyA tail” is a region of mRNA that is downstream, e.g., directly downstream (i.e., 3′), from the 3′ UTR that contains multiple, consecutive adenosine monophosphates. A polyA tail may contain 10 to 300 adenosine monophosphates. For example, a polyA tail may contain 10, 20, 30, 40, 50, 60, 70, 80, 90, 100, 110, 120, 130, 140, 150, 160, 170, 180, 190, 200, 210, 220, 230, 240, 250, 260, 270, 280, 290 or 300 adenosine monophosphates. In some embodiments, a polyA tail contains 50 to 250 adenosine monophosphates. In a relevant biological setting (e.g., in cells, in vivo) the poly(A) tail functions to protect mRNA from enzymatic degradation, e.g., in the cytoplasm, and aids in transcription termination, export of the mRNA from the nucleus and translation.

[0190] In some embodiments, a polynucleotide includes 200 to 3,000 nucleotides. For example, a polynucleotide may include 200 to 500, 200 to 1000, 200 to 1500, 200 to 3000, 500 to 1000, 500 to 1500, 500 to 2000, 500 to 3000, 1000 to 1500, 1000 to 2000, 1000 to 3000, 1500 to 3000, or 2000 to 3000 nucleotides.

### Flagellin Adjuvants

[0191] Flagellin is an approximately 500 amino acid monomeric protein that polymerizes to form the flagella associated with bacterial motion. Flagellin is expressed by a variety of flagellated bacteria (Salmonella typhimurium for example) as well as non-flagellated bacteria (such as Escherichia coli). Sensing of flagellin by cells of the innate immune system (dendritic cells, macrophages, etc.) is mediated by the Toll-like receptor 5 (TLR5) as well as by Nod-like receptors (NLRs) Ipaf and Naip5. TLRs and NLRs have been identified as playing a role in the activation of innate immune response and adaptive immune response. As such, flagellin provides an adjuvant effect in a vaccine.

[0192] The nucleotide and amino acid sequences encoding known flagellin polypeptides are publicly available in the NCBI GenBank database. The flagellin sequences from S. Typhimurium, H. Pylori, V. Cholera, S. marcescens, S. flexneri, T. Pallidum, L. pneumophila, B. burgdorferei, C. difficile, R. meliloti, A. tumefaciens, R. lupini, B. clarridgeiae, P. Mirabilis, B. subtilus, L. monocytogenes, P. aeruginosa, and E. coli, among others are known.

[0193] A flagellin polypeptide. as used herein, refers to a full length flagellin protein, immunogenic fragments thereof, and peptides having at least 50% sequence identify to a flagellin protein or immunogenic fragments thereof. Exemplary flagellin proteins include flagellin from Salmonella Entry typhi (UniPro number: Q56086), Salmonella typhimurium (A0A0C9DG09). Salmonella enteritidis (A0A0C9BAB7), and Salmonella choleraesuis (Q6V2X8), and SEQ ID NO: 54-56. In some embodiments, the flagellin polypeptide has at least 60%, 70%, 75%, 80%, 90%, 95%, 97%, 98%, or 99% sequence identify to a flagellin protein or immunogenic fragments thereof.

[0194] In some embodiments, the flagellin polypeptide is an immunogenic fragment. An immunogenic fragment is a portion of a flagellin protein that provokes an immune response. In some embodiments, the immune response is a TLR5 immune response. An example of an immunogenic fragment is a flagellin protein in which all or a portion of a hinge region has been deleted or replaced with other amino acids. For example, an antigenic polypeptide may be inserted in the hinge region. Hinge regions are the hypervariable regions of a flagellin. Hinge regions of a flagellin are also referred to as “D3 domain or region, “propeller domain or region,” “hypervariable domain or region” and “variable domain or region.” “At least a portion of a hinge region,” as used herein, refers to any part of the hinge region of the flagellin, or the entirety of the hinge region. In other embodiments an immunogenic fragment of flagellin is a 20, 25, 30, 35, or 40 amino acid C-terminal fragment of flagellin.

[0195] The flagellin monomer is formed by domains DO through D3. DO and D1, which form the stem, are composed of tandem long alpha helices and are highly conserved among different bacteria. The DI domain includes several stretches of amino acids that are useful for TLR5 activation. The entire DI domain or one or more of the active regions within the domain are immunogenic fragments of flagellin. Examples of immunogenic regions within the DI domain include residues 88-114 and residues 411-431 (in Salmonella typhimurium FliC flagellin. Within the 13 amino acids in the 88-100 region, at least 6 substitutions are permitted between Salmonella flagellin and other flagellins that still preserve TLR5 activation. Thus, immunogenic fragments of flagellin include flagellin like sequences that activate TLR5 and contain a 13 amino acid motif that is 53% or more identical to the Salmonella sequence in 88-100 of FliC (LQRVRELAVQSAN; SEQ ID NO: 84).

[0196] In some embodiments, the composition includes a nucleic acid sequence that encodes a fusion protein of flagellin and one or more antigenic polypeptides. A “fusion protein” as used herein, refers to a linking of two components of the construct. In some embodiments, a carboxy-terminus of the antigenic polypeptide is fused or linked to an amino terminus of the flagellin polypeptide. In other embodiments, an amino-terminus of the antigenic polypeptide is fused or linked to a carboxy-terminus of the flagellin polypeptide. The fusion protein may include, for example, one, two, three, four, five, six or more flagellin polypeptides linked to one, two, three, four, five, six or more antigenic polypeptides. When two or more flagellin polypeptides and/or two or more antigenic polypeptides are linked such a construct may be referred to as a “multimer.”

[0197] Each of the components of a fusion protein may be directly linked to one another or they may be connected through a linker. For instance, the linker may be an amino acid linker. The amino acid linker encoded for by the composition to link the components of the fusion protein may include, for instance, at least one member selected from the group consisting of a lysine residue, a glutamic acid residue, a serine residue and an arginine residue. In some embodiments the linker is 1-30, 1-25, 1-25, 5-10, 5, 15, or 5-20 amino acids in length.

[0198] In other embodiments, the composition includes at least three separate nucleic acid sequences, one encoding one or more antigenic polypeptides, one encoding one or more universal T-cell epitope, and the other encoding the flagellin polypeptide. The at least three nucleic acid sequences may be co-formulated in a carrier such as a lipid nanoparticle.

### Stabilizing Elements

[0199] Naturally-occurring eukaryotic mRNA molecules have been found to contain stabilizing elements, including, but not limited to untranslated regions (UTR) at their 5′-end (5′UTR) and/or at their 3′-end (3′UTR), in addition to other structural features, such as a 5′-cap structure or a 3′-poly(A) tail. Both the 5′UTR and the 3′UTR are typically transcribed from the genomic DNA and are elements of the premature mRNA. Characteristic structural features of mature mRNA, such as the 5′-cap and the 3′-poly(A) tail are usually added to the transcribed (premature) mRNA during mRNA processing. The 3′-poly(A) tail is typically a stretch of adenine nucleotides added to the 3′-end of the transcribed mRNA. It can comprise up to about 400 adenine nucleotides. In some embodiments the length of the 3′-poly(A) tail may be an essential element with respect to the stability of the individual mRNA.

[0200] In some embodiments the nucleic acid sequence (e.g., mRNA) may include one or more stabilizing elements. Stabilizing elements may include for instance a histone stem-loop. A stem-loop binding protein (SLBP), a 32 kDa protein has been identified. It is associated with the histone stem-loop at the 3′-end of the histone messages in both the nucleus and the cytoplasm. Its expression level is regulated by the cell cycle; it peaks during the S-phase, when histone mRNA levels are also elevated. The protein has been shown to be essential for efficient 3′-end processing of histone pre-mRNA by the U7 snRNP. SLBP continues to be associated with the stem-loop after processing, and then stimulates the translation of mature histone mRNAs into histone proteins in the cytoplasm. The RNA binding domain of SLBP is conserved through metazoa and protozoa; its binding to the histone stem-loop depends on the structure of the loop. The minimum binding site includes at least three nucleotides 5′ and two nucleotides 3′ relative to the stem-loop.

[0201] In some embodiments, the nucleic acid sequence (e.g., mRNA) include a coding region, at least one histone stem-loop, and optionally, a poly(A) sequence or polyadenylation signal. The poly(A) sequence or polyadenylation signal generally should enhance the expression level of the encoded protein. The encoded protein, in some embodiments, is not a histone protein, a reporter protein (e.g. Luciferase, GFP, EGFP, B-Galactosidase, EGFP), or a marker or selection protein (e.g. alpha-Globin, Galactokinase and Xanthine: guanine phosphoribosyl transferase (GPT)).

[0202] In some embodiments, the combination of a poly(A) sequence or polyadenylation signal and at least one histone stem-loop, even though both represent alternative mechanisms in nature, acts synergistically to increase the protein expression beyond the level observed with either of the individual elements. It has been found that the synergistic effect of the combination of poly(A) and at least one histone stem-loop does not depend on the order of the elements or the length of the poly(A) sequence.

[0203] In some embodiments, the nucleic acid sequence (e.g., mRNA) does not comprise a histone downstream element (HDE). “Histone downstream element” (HDE) includes a purine-rich polynucleotide stretch of approximately 15 to 20 nucleotides 3′ of naturally occurring stem-loops, representing the binding site for the U7 snRNA, which is involved in processing of histone pre-mRNA into mature histone mRNA. Ideally, the inventive nucleic acid does not include an intron.

[0204] In some embodiments, the nucleic acid sequence (e.g., mRNA) may or may not contain an enhancer and/or promoter sequence, which may be modified or unmodified or which may be activated or inactivated. In some embodiments, the histone stem-loop is generally derived from histone genes, and includes an intramolecular base pairing of two neighbored partially or entirely reverse complementary sequences separated by a spacer, including (e.g., consisting of) a short sequence, which forms the loop of the structure. The unpaired loop region is typically unable to base pair with either of the stem loop elements. It occurs more often in RNA, as is a key component of many RNA secondary structures, but may be present in single-stranded DNA as well. Stability of the stem-loop structure generally depends on the length, number of mismatches or bulges, and base composition of the paired region. In some embodiments, wobble base pairing (non-Watson-Crick base pairing) may result. In some embodiments, the at least one histone stem-loop sequence comprises a length of 15 to 45 nucleotides.

[0205] In other embodiments the nucleic acid sequence (e.g., mRNA) may have one or more AU-rich sequences removed. These sequences, sometimes referred to as AURES are destabilizing sequences found in the 3′UTR. The AURES may be removed from the nucleic acid sequence (e.g., mRNA). Alternatively, the AURES may remain in the nucleic acid sequence (e.g., mRNA).

### Delivery Methods

[0206] Suitable nucleic acid delivery vehicles are well known in the art and can include, but are not limited to lipid-based (e.g., a liposome formulation, lipoplexes, or lipid nanoparticles (LNP)), viral-based, or physical methods such as injection, microinjection, electroporation, ultrasound, gene gun, hydrodynamic applications, or any combination thereof.

### Nanoparticles

[0207] Described herein are nanoparticles including a nucleic acid sequence (e.g., mRNA) encoding an infection agent antigenic polypeptide and a nucleic acid sequence (e.g., mRNA) encoding at least one universal T-cell epitope, as well as, nanoparticles including a nucleic acid sequence (e.g., mRNA) encoding an infection agent antigenic polypeptide and at least one universal T-cell epitope.

[0208] The nanoparticles described herein, can include multiple nucleic acid sequence (e.g., mRNA) each encoding a single infection agent antigenic polypeptide and multiple nucleic acid sequences (e.g., mRNA) each encoding a single universal T-cell epitope, as well as, nanoparticles including a single nucleic acid sequence (e.g., mRNA) encoding one or more infection agent antigenic polypeptide and a single nucleic acid sequence (e.g., mRNA) polynucleotide encoding one or more universal T-cell epitope.

[0209] The nanoparticles described herein, can include multiple nucleic acid sequence (e.g., mRNA) each encoding a single infection agent antigenic polypeptide and a single universal T-cell epitope, as well as, nanoparticles including a single nucleic acid sequence (e.g., mRNA) polynucleotides encoding one or more infection agent antigenic polypeptide and one or more universal T-cell epitope.

[0210] The nanoparticles described herein, in some embodiments, include 2-10 (e.g., 2, 3, 4, 5, 6, 7, 8, 9 or 10), or more, nucleic acid sequences having an open reading frame, each of which encodes a different infection agent antigenic polypeptide (or a single nucleic acid sequence encoding 2-10, or more, different infection agent antigenic polypeptides). The nanoparticles described herein, in some embodiments, include 2-10 (e.g., 2, 3, 4, 5, 6, 7, 8, 9 or 10), or more, nucleic acid sequence having an open reading frame, each of which encodes a different universal T-cell epitope (or a single nucleic acid sequence encoding 2-10, or more, different universal T-cell epitopes).

[0211] In some embodiments, the nanoparticle can be a lipid nanoparticle. In some embodiments, the nanoparticles can be a lipid-polycation complex, referred to as a cationic lipid nanoparticle. As a non-limiting example, the polycation may include a cationic peptide or a polypeptide such as, but not limited to, polylysine, polyornithine and/or polyarginine. In some embodiments, the lipid nanoparticle can include a non-cationic lipid such as, but not limited to, cholesterol or dioleoyl phosphatidylethanolamine (DOPE).

[0212] A lipid nanoparticle formulation may be influenced by, but not limited to, the selection of the cationic lipid component, the degree of cationic lipid saturation, the nature of the PEGylation, ratio of all components and biophysical parameters such as size. In one example by Semple et al. (Nature Biotech. 2010 28:172-176), the lipid nanoparticle can further include 57% cationic lipid, 7% dipalmitoylphosphatidylcholine, 34% cholesterol, and 1.5% PEG-c-DMA. As another example, changing the composition of the cationic lipid can more effectively deliver siRNA to various antigen presenting cells (Basha et al. Mol Ther. 2011 19:2186-2200).

[0213] In some embodiments, lipid nanoparticle formulations may comprise 35 to 45% cationic lipid, 40% to 50% cationic lipid, 50% to 60% cationic lipid and/or 55% to 65% cationic lipid. In some embodiments, the ratio of lipid to nucleic acid (e.g., mRNA) in lipid nanoparticles may be 5:1 to 20:1, 10:1 to 25:1, 15:1 to 30:1 and/or at least 30:1.

[0214] Lipid nanoparticle formulations typically comprise a lipid, in particular, an ionizable cationic lipid, and further comprise a neutral lipid, a sterol and a molecule capable of reducing particle aggregation, for example a PEG or PEG-modified lipid.

[0215] In some embodiments, a lipid nanoparticle formulation comprises at least one ionizable lipid, cationic lipid, vitamin-based lipid, or any combination thereof; a neutral lipid selected from DSPC, DPPC, POPC, DOPE and SM; (iii) a sterol, e.g., cholesterol; and (iv) a PEG-lipid, e.g., PEG-DMG or PEG-cDMA, in a molar ratio of 20-60% cationic lipid: 5-25% neutral lipid: 25-55% sterol; 0.5-15% PEG-lipid.

[0216] In some embodiments, a lipid nanoparticle formulation includes 25% to 75% on a molar basis of a cationic lipid selected from 2,2-dilinoleyl-4-dimethylaminoethyl-[1,3]-dioxolane (DLin-KC2-DMA), dilinoleyl-methyl-4-dimethylaminobutyrate (DLin-MC3-DMA), and di((Z)-non-2-en-1-yl) 9-((4-(dimethylamino)butanoyl)oxy) heptadecanedioate (L319), e.g., 35 to 65%, 45 to 65%, 60%, 57.5%, 50% or 40% on a molar basis.

[0217] In some embodiments, lipid nanoparticle formulations include 25-75% of a cationic lipid, 0.5-15% of the neutral lipid, 5-50% of the sterol, and 0.5-20% of the PEG or PEG-modified lipid on a molar basis.

[0218] In some embodiments, lipid nanoparticle formulations include 35-65% of a cationic lipid, 3-12% of the neutral lipid, 15-45% of the sterol, and 0.5-10% of the PEG or PEG-modified lipid on a molar basis.

[0219] In some embodiments, lipid nanoparticle formulations include 45-65% of a cationic lipid, 5-10% of the neutral lipid, 25-40% of the sterol, and 0.5-10% of the PEG or PEG-modified lipid on a molar basis.

[0220] In some embodiments, lipid nanoparticle formulations include 60% of a cationic lipid, 7.5% of the neutral lipid, 31% of the sterol, and 1.5% of the PEG or PEG-modified lipid on a molar basis.

[0221] In some embodiments, lipid nanoparticle formulations include 50% of a cationic lipid, 10% of the neutral lipid, 38.5% of the sterol, and 1.5% of the PEG or PEG-modified lipid on a molar basis.

[0222] In some embodiments, lipid nanoparticle formulations include 50% of a cationic lipid, 10% of the neutral lipid, 35% of the sterol, 4.5% or 5% of the PEG or PEG-modified lipid, and 0.5% of the targeting lipid on a molar basis.

[0223] In some embodiments, lipid nanoparticle formulations include 40% of a cationic lipid, 15% of the neutral lipid, 40% of the sterol, and 5% of the PEG or PEG-modified lipid on a molar basis.

[0224] In some embodiments, lipid nanoparticle formulations include 57.2% of a cationic lipid, 7.1% of the neutral lipid, 34.3% of the sterol, and 1.4% of the PEG or PEG-modified lipid on a molar basis.

[0225] In some embodiments, lipid nanoparticle formulations include 57.5% of a cationic lipid selected from the PEG lipid is PEG-cDMA (PEG-CDMA is further discussed in Reyes et al. (J. Controlled Release, 107, 276-287 (2005), the contents of which are herein incorporated by reference in their entirety), 7.5% of the neutral lipid, 31.5% of the sterol, and 3.5% of the PEG or PEG-modified lipid on a molar basis.

[0226] In some embodiments, lipid nanoparticle formulations including a lipid mixture in molar ratios of 20-70% cationic lipid: 5-45% neutral lipid: 20-55% cholesterol: 0.5-15% PEG-modified lipid. In some embodiments, lipid nanoparticle formulations including a lipid mixture in a molar ratio of 20-60% cationic lipid: 5-25% neutral lipid: 25-55% cholesterol: 0.5-15% PEG-modified lipid.

[0227] In some embodiments, the molar lipid ratio is 50/10/38.5/1.5 (mol % cationic lipid/neutral lipid, e.g., DSPC/Chol/PEG-modified lipid, e.g., PEG-DMG, PEG-DSG or PEG-DPG), 57.2/7.1/34.3/1.4 (mol % cationic lipid/neutral lipid, e.g., DPPC/Chol/PEG-modified lipid, e.g., PEG-cDMA), 40/15/40/5 (mol % cationic lipid/neutral lipid, e.g., DSPC/Chol/PEG-modified lipid, e.g., PEG-DMG). 50/10/35/4.5/0.5 (mol % cationic lipid/neutral lipid, e.g., DSPC/Chol/PEG-modified lipid, e.g., PEG-DSG), 50/10/35/5 (cationic lipid/neutral lipid, e.g., DSPC/Chol/PEG-modified lipid, e.g., PEG-DMG), 40/10/40/10 (mol % cationic lipid/neutral lipid, e.g., DSPC/Chol/PEG-modified lipid, e.g., PEG-DMG or PEG-cDMA), 35/15/40/10 (mol % cationic lipid/neutral lipid, e.g., DSPC/Chol/PEG-modified lipid, e.g., PEG-DMG or PEG-cDMA) or 52/13/30/5 (mol % cationic lipid/neutral lipid, e.g., DSPC/Chol/PEG-modified lipid, e.g., PEG-DMG or PEG-cDMA).

[0228] Non-limiting examples of lipid nanoparticle compositions and methods of making them are described, for example, in Semple et al. (2010) Nat. Biotechnol. 28:172-176; Jayarama et al. (2012), Angew. Chem. Int. Ed., 51:8529-8533; and Maier et al. (2013) Molecular Therapy 21, 1570-1578 (the contents of each of which are incorporated herein by reference in their entirety).

[0229] In some embodiments, lipid nanoparticle formulations may comprise a cationic lipid, a PEG lipid and a structural lipid and optionally comprise a non-cationic lipid. As a non-limiting example, a lipid nanoparticle may comprise 40-60% of cationic lipid, 5-15% of a non-cationic lipid, 1-2% of a PEG lipid and 30-50% of a structural lipid. As another non-limiting example, the lipid nanoparticle may comprise 50% cationic lipid, 10% non-cationic lipid, 1.5% PEG lipid and 38.5% structural lipid. As yet another non-limiting example, a lipid nanoparticle may comprise 55% cationic lipid, 10% non-cationic lipid, 2.5% PEG lipid and 32.5% structural lipid.

[0230] In some embodiments, the lipid nanoparticle formulations described herein may be 4 component lipid nanoparticles. The lipid nanoparticle may comprise a cationic lipid, a non-cationic lipid, a PEG lipid and a structural lipid. As a non-limiting example, the lipid nanoparticle may comprise 40-60% of cationic lipid, 5-15% of a non-cationic lipid, 1-2% of a PEG lipid and 30-50% of a structural lipid. As another non-limiting example, the lipid nanoparticle may comprise 50% cationic lipid, 10% non-cationic lipid, 1.5% PEG lipid and 38.5% structural lipid. As yet another non-limiting example, the lipid nanoparticle may comprise 55% cationic lipid, 10% non-cationic lipid, 2.5% PEG lipid and 32.5% structural lipid.

[0231] In some embodiments, the lipid nanoparticle formulations described herein may comprise a cationic lipid, a non-cationic lipid, a PEG lipid and a structural lipid. As a non-limiting example, the lipid nanoparticle comprises 50% of the cationic lipid DLin-KC2-DMA, 10% of the non-cationic lipid DSPC, 1.5% of the PEG lipid PEG-DOMG and 38.5% of the structural lipid cholesterol. As a non-limiting example, the lipid nanoparticle comprises 50% of the cationic lipid DLin-MC3-DMA, 10% of the non-cationic lipid DSPC, 1.5% of the PEG lipid PEG-DOMG and 38.5% of the structural lipid cholesterol. As a non-limiting example, the lipid nanoparticle comprises 50% of the cationic lipid DLin-MC3-DMA, 10% of the non-cationic lipid DSPC, 1.5% of the PEG lipid PEG-DMG and 38.5% of the structural lipid cholesterol. As yet another non-limiting example, the lipid nanoparticle comprises 55% of the cationic lipid L319, 10% of the non-cationic lipid DSPC. 2.5% of the PEG lipid PEG-DMG and 32.5% of the structural lipid cholesterol.

[0232] In some embodiments, the nanoparticles may be such as those described in U.S. Pat. No. 10,933,127, the contents of which is herein incorporated by reference in its entirety. In some embodiments, the nanoparticles may be such as those described in U.S. Pat. No. 10,933,127, for example, nanoparticles including a compound according to Formula (I), (Ia), (II), (IIa), (IIb), (IIc), (IId), or (IIe) described from column 101 to column 187.

[0233] In some embodiments, lipid nanoparticles can include 20% to 80% of an ionizable lipid, cationic lipid, vitamin based derivative lipid, or any combination thereof; greater than 0% to 5% polyethylene glycol-lipid; greater than 0% to 20% helper lipids; 20% to 80% sterol; a nucleic acid sequence encoding an infection agent antigenic polypeptide; and a nucleic acid sequence encoding at least one T-cell epitope encapsulated in the nanoparticle.

[0234] In some embodiments, lipid nanoparticles can include 20% to 80% of an ionizable lipid, cationic lipid, a vitamin based derivative lipid, or any combination thereof; greater than 0% to 5% polyethylene glycol-lipid; greater than 0% to 20% helper lipids; 20% to 80% sterol; and a nucleic acid sequence encoding an infection agent antigenic polypeptide and at least one T-cell epitope encapsulated in the nanoparticle.

[0235] In one embodiment, the nanoparticle can include from 40% to 60% of an ionizable lipid, cationic lipid, a vitamin based derivative lipid, or any combination thereof; from 1% to 2% polyethylene glycol-lipid; from 8% to 12% helper lipids; from 35% to 40% sterol; a nucleic acid sequence encoding an infection agent antigenic polypeptide; and a nucleic acid sequence encoding at least one T-cell epitope encapsulated in the nanoparticle.

[0236] In one embodiment, the nanoparticle can include from 40% to 60% of an ionizable lipid, cationic lipid, a vitamin based derivative lipid, or any combination thereof; from 1% to 2% polyethylene glycol-lipid; from 8% to 12% helper lipids; from 35% to 40% sterol; and a nucleic acid sequence encoding an infection agent antigenic polypeptide and at least one T-cell epitope encapsulated in the nanoparticle.

[0237] In some embodiments, a nanoparticle (e.g., a lipid nanoparticle) has a mean diameter of 10-500 nm, 20-400 nm, 30-300 nm, 40-200 nm. In some embodiments, a nanoparticle (e.g., a lipid nanoparticle) has a mean diameter of 50-150 nm, 50-200 nm, 80-100 nm or 80-200 nm.

[0238] The lipid nanoparticles described herein may be made in a sterile environment.

[0239] In some embodiments, the LNP formulation may be formulated in a nanoparticle such as a nucleic acid-lipid particle. As a non-limiting example, the lipid particle may comprise one or more active agents or therapeutic agents; one or more cationic lipids comprising from about 50 mol % to about 85 mol % of the total lipid present in the particle; one or more non-cationic lipids comprising from about 13 mol % to about 49.5 mol % of the total lipid present in the particle; and one or more conjugated lipids that inhibit aggregation of particles comprising from about 0.5 mol % to about 2 mol % of the total lipid present in the particle.

[0240] The nanoparticle formulations may comprise a phosphate conjugate. The phosphate conjugate may increase in vivo circulation times and/or increase the targeted delivery of the nanoparticle. As a non-limiting example, the phosphate conjugates may include a compound of any one of the formulas described in International Application No. WO2013033438, the contents of which are herein incorporated by reference in its entirety.

[0241] The nanoparticle formulation may comprise a polymer conjugate. The polymer conjugate may be a water soluble conjugate. The polymer conjugate may have a structure as described in U.S. patent application No. 20130059360, the contents of which are herein incorporated by reference in its entirety. In some embodiments, polymer conjugates with the polynucleotides of the present disclosure may be made using the methods and/or segmented polymeric reagents described in U.S. patent application No. 20130072709, the contents of which are herein incorporated by reference in its entirety. In some embodiments, the polymer conjugate may have pendant side groups comprising ring moieties such as, but not limited to, the polymer conjugates described in U.S. Patent Publication No. US20130196948, the contents which are herein incorporated by reference in its entirety.

[0242] The nanoparticle formulations may comprise a conjugate to enhance the delivery of nanoparticles of the present disclosure in a subject. Further, the conjugate may inhibit phagocytic clearance of the nanoparticles in a subject. In one aspect, the conjugate may be a “self”′ peptide designed from the human membrane protein CD47 (e.g., the “self” particles described by Rodriguez et al. (Science 2013 339, 971-975), herein incorporated by reference in its entirety). As shown by Rodriguez et al., the self peptides delayed macrophage-mediated clearance of nanoparticles which enhanced delivery of the nanoparticles. In another aspect, the conjugate may be the membrane protein CD47 (e.g., see Rodriguez et al. Science 2013 339, 971-975, herein incorporated by reference in its entirety). Rodriguez et al. showed that, similarly to “self” peptides, CD47 can increase the circulating particle ratio in a subject as compared to scrambled peptides and PEG coated nanoparticles.

[0243] In some embodiments, the nanoparticles can include a conjugate to enhance the delivery of the nanoparticles of the present disclosure in a subject. The conjugate may be the CD47 membrane or the conjugate may be derived from the CD47 membrane protein, such as the “self” peptide described previously. In some embodiments, the nanoparticle may comprise PEG and a conjugate of CD47 or a derivative thereof. In some embodiments, the nanoparticle may comprise both the “self” peptide described above and the membrane protein CD47.

[0244] In some embodiments, a “self” peptide and/or CD47 protein may be conjugated to a virus-like particle or pseudovirion, as described herein for delivery of the nucleic acid sequence (e.g., mRNA) of the present disclosure.

[0245] In some embodiments, compositions comprising the polynucleotides of the present disclosure and a conjugate that may have a degradable linkage. Non-limiting examples of conjugates include an aromatic moiety comprising an ionizable hydrogen atom, a spacer moiety, and a water-soluble polymer. As a non-limiting example, pharmaceutical compositions comprising a conjugate with a degradable linkage and methods for delivering such pharmaceutical compositions are described in U.S. Patent Publication No. US20130184443, the contents of which are herein incorporated by reference in their entirety.

### Neutral Lipid

[0246] In some embodiments, a lipid nanoparticle formulation includes 0.5% to 15% on a molar basis of the neutral lipid, e.g., 3 to 12%, 5 to 10% or 15%, 10%, or 7.5% on a molar basis. Examples of neutral lipids include, without limitation, DSPC, POPC, DPPC, DOPE and SM. In some embodiments, the formulation includes 5% to 50% on a molar basis of the sterol (e.g., 15 to 45%, 20 to 40%, 40%, 38.5%, 35%, or 31% on a molar basis. A non-limiting example of a sterol is cholesterol. In some embodiments, a lipid nanoparticle formulation includes 0.5% to 20% on a molar basis of the PEG or PEG-modified lipid (e.g., 0.5 to 10%, 0.5 to 5%, 1.5%, 0.5%, 1.5%, 3.5%, or 5% on a molar basis. In some embodiments, a PEG or PEG modified lipid comprises a PEG molecule of an average molecular weight of 2,000 Da. In some embodiments, a PEG or PEG modified lipid comprises a PEG molecule of an average molecular weight of less than 2,000, for example around 1,500 Da, around 1,000 Da, or around 500 Da. Non-limiting examples of PEG-modified lipids include PEG-distearoyl glycerol (PEG-DMG) (also referred herein as PEG-C14 or C14-PEG), PEG-CDMA (further discussed in Reyes et al. J. Controlled Release, 107, 276-287 (2005) the contents of which are herein incorporated by reference in their entirety).

### Zwitterionic Lipids

[0247] In some embodiments, the composition may be encapsulated in, linked to and/or associated with zwitterionic lipids. Non-limiting examples of zwitterionic lipids and methods of using zwitterionic lipids are described in U.S. Patent Publication No. US20130216607, the contents of which are herein incorporated by reference in their entirety. In some aspects, the zwitterionic lipids may be used in the liposomes and lipid nanoparticles described herein.

### Cationic Lipids

[0248] Suitable cationic lipids may include, but are not limited to, 2-amino-3-[(9Z,12Z)-octadeca-9,12-dien-1-yloxy]-2-{[(9Z,2Z)-octadeca-9,12-dien-1-yloxy]methyl}propan-1-ol (Compound 1 in US20130150625); 2-amino-3-[(9Z)-octadec-9-en-1-yloxy]-2-{[(9Z)-octadec-9-en-1-yloxy]methyl}propan-1-ol (Compound 2 in US20130150625); 2-amino-3-[(9Z,12Z)-octadeca-9, 12-dien-1-yloxy]-2-[(octyloxy)methyl]propan-1-ol (Compound 3 in US20130150625); and 2-(dimethylamino)-3-[(9Z, 12Z)-octadeca-9, 12-dien-1-yloxy]-2-{[(9Z,12Z)-octadeca-9,12-dien-1-yloxy]methyl}propan-1-ol (Compound 4 ir US20130150625); or any pharmaceutically acceptable salt or stereoisomer thereof. As a non-limiting example, the cationic lipid may be selected from (20Z,23Z)-N,N-dimethylnonacosa-20,23-dien-10-amine, (17Z,20Z)-N,N-dimemylhexacosa-17,20-dien-9-amine, (1Z,19Z)-N5N-dimethylpentacosa-16, 19-dien-8-amine, (13Z,16Z)-N,N-dimethyldocosa-13,16-dien-5-amine, (12Z, 15Z)-N,N-dimethylhenicosa-12,15-dien-4-amine, (14Z,17Z)-N,N-dimethyltricosa-14,17-dien-6-amine, (15Z,18Z)-N,N-dimethyltetracosa-15,18-dien-7-amine, (18Z,21Z)-N,N-dimethylheptacosa-18,21-dien-10-amine, (15Z,18Z)-N,N-dimethyltetracosa-15,18-dien-5-amine, (14Z,17Z)-N,N-dimethyltricosa-14,17-dien-4-amine, (19Z,22Z)-N,N-dimeihyloctacosa-19,22-dien-9-amine, (18Z,21 Z)-N,N-dimethylheptacosa-18,21-dien-8 amine, (17Z,20Z)-N,N-dimethylhexacosa-17,20-dien-7-amine, (16Z, 19Z)-N,N-dimethylpentacosa-16,19-dien-6-amine, (22Z,25Z)-N,N-dimethylhentriaconta-22,25-dien-10-amine, (21 Z,24Z)-N,N-dimethyltriaconta-21,24-dien-9-amine, (18Z)-N,N-dimetylheptacos-18-en-10-amine, (17Z)-N,N-dimethylhexacos-17-en-9-amine, (19Z,22Z)-N,N-dimethyloctacosa-19,22-dien-7-amine, N,N-(20Z,23Z)-N-ethyl-N-methylnonacosa-20,23-dien-10-dimethylheptacosan-10-amine, amine, 1-[(11Z, 14Z)-1-nonylicosa-11,14-dien-1-yl]pyrrolidine, (20Z)-N,N-dimethylheptacos-20-en-10-amine, (15Z)-N,N-dimethyl eptacos-15-en-10-amine, (14Z)-N,N-dimethylnonacos-14-en-10-amine, (17Z)-N,N-dimethylnonacos-17-en-10-amine, (24Z)-N,N-dimethyltritriacont-24-en-10-amine, (20Z)-N,N-dimethylnonacos-20-en-10-amine, (22Z)-N,N-dimethylhentriacont-22-en-10-amine, (16Z)-N,N-dimethylpentacos-16-en-8-amine, (12Z,15Z)-N,N-dimethyl-2-nonylhenicosa-12,15-dien-1-amine, (13Z,16Z)-N,N-dimethyl-3-nonyldocosa-13,16-dien-1 amine, N,N-dimethyl-1-[(1S,2R)-2-octylcyclopropylJeptadecan-8-amine, 1-[(1S,2R)-2-hexylcyclopropyl]-N,N-dimethylnonadecan-10-amine, N,N-dimethyl-1-[(1S,2R)-2-octylcyclopropyl]nonadecan-10-amine, N,N-dimethyl-21-](1S,2R)-2-octylcyclopropyl]henicosan-10-amine, N,N-dimethyl-1-[(1S,2S)-2-{[(1R,2R)-2-pentylcyclopropyl]methyl}cyclopropyl]nonadecan-10-amine,N,N-dimethyl-1-[(1S,2R)-2-octylcyclopropyl]hexadecan-8-amine, N,N-dimethyl-[(1R,2S)-2-undecylcyclopropyl]tetradecan-5-amine, N,N-dimethyl-3-{7-[(1S,2R)-2-octylcyclopropyl]heptyl}dodecan-1-amine, 1-[(1R,2S)-2-heptylcyclopropyl]-N,N-dimethyloctadecan-9-amine, 1-[(1S,2R)-2-decylcyclopropyl]-N,N-dimethylpentadecan-6-amine, N,N-dimethyl-1-RIS,2R)-2-octylcyclopropyllpentadecan-8-amine, R-N,N-dimethyl-1-[(9Z, 12Z)-octadeca-9, 12-dien-1-yloxy]-3-(octyloxy) propan-2-amine, S-N,N-dimethyl-1-[(9Z, 12Z)-octadeca-9, 12-dien-1-yloxy]-3-(octyloxy) propan-2-amine, 1-{2-[(9Z,12Z)-octadeca-9, 12-dien-1-yloxy]-1-[(octyloxy)methyl]ethyl}pyrrolidine, (2S)-N,N-dimethyl-1-[(9Z, 12Z)-octadeca-9,12-dien-1-yloxy]-3-[(5Z)-oct-5-en-1-yloxy]propan-2-amine, 1-{2-[(9Z, 12Z)-octadeca-9, 12-dien-1-yloxy]-1-[(octyloxy)methyl]ethyl}azetidine, (2S)-1-(hexyloxy)-N,N-dimethyl-3-R9Z,12Z)-octadeca-9,12-dien-1-yloxylpropan-2-amine, (2S)-1-(heptyloxy)-N,N-dimethyl-3-R9Z,12Z)-octadeca-9,12-dien-1-yloxylpropan-2-amine, N,N-dimethyl-1-(nonyloxy)-3-R9Z,12Z)-octadeca-9,12-dien-1-yloxylpropan-2-amine, N,N-dimethyl-1-[(9Z)-octadec-9-en-1-yloxy]-3-(octyloxy) propan-2-amine; (2S)-N,N-dimethyl-1-[(6Z,9Z,12Z)-octadeca-6,9, 12-trien-1-yloxy]-3-(octyloxy) propan-2-amine, (2S)-1-[(11Z,14Z)-icosa-11,14-dien-1-yloxy]-N,N-dimethyl-3-(pentyloxy) propan-2-amine, (2S)-1-(hexyloxy)-3-[(11Z,14Z)-icosa-11,14-dien-1-yloxy]-N,N-dimethylpropan-2-amine, 1-[(11Z, 14Z)-icosa-11,14-dien-1-yloxy]-N,N-dimethyl-3-(octyloxy) propan-2-amine, 1-[(13Z, 16Z)-docosa-13,16-dien-1-yloxy]-N,N-dimethyl-3-(octyloxy) propan-2-amine, (2S)-1-[(13Z, 16Z)-docosa-13, 16-dien-1-yloxy]-3-(hexyloxy)-N,N-dimethylpropan-2-amine, (2S)-1-[(13Z)-docos-13-en-1-yloxy]-3-(hexyloxy)-N,N-dimethylpropan-2-amine, 1-[(13Z)-docos-13-en-1-yloxy]-N,N-dimethyl-3-(octyloxy) propan-2-amine, 1-[(9Z)-hexadec-9-en-1-yloxy]-N,N-dimethyl-3-(octyloxy) propan-2-amine, (2R)-N,N-dimethyl-H (1-metoyloctyl)oxy]-3-[(9Z, 12Z)-octadeca-9, 12-dien-1-yloxy]propan-2-amine, (2R)-1-[(3,7-dimethyloctyl)oxy]-N,N-dimethyl-3-R9Z,12Z)-octadeca-9,12-dien-1-yloxylpropan-2-amine, N,N-dimethyl-1-(octyloxy)-3-({8-R1S,25)-2-{[(1R,2R)-2-pentylcyclopropyl]methyl}cyclopropyl]octyl}oxy) propan-2-amine, N,N-dimethyl-1-1 [8-(2-oclylcyclopropyl) octyl]oxy}-3-(octyloxy) propan-2-amine and (11E,20Z,23Z)-N,N-dimethylnonacosa-11,20,2-trien-10-amine or a pharmaceutically acceptable salt or stereoisomer thereof. In some embodiments, the lipid may be a cationic lipid such as, but not limited to, DLin-DMA, DLin-D-DMA. DLin-MC3-DMA, DLin-KC2-DMA, DODMA and amino alcohol lipids. The amino alcohol cationic lipid may be the lipids described in and/or made by the methods described in U.S. Patent Publication No. US20130150625, herein incorporated by reference in its entirety. In some embodiments, the nanoparticles described herein may include an amine cationic lipid such as those described in International Patent Application No. WO2013059496, the contents of which are herein incorporated by reference in their entirety. In some embodiments, the cationic lipids may have an amino-amine or an amino-amide moiety.

[0249] In some embodiments, the cationic lipid may be a low molecular weight cationic lipid such as those described in U.S. patent application No. 20130090372, the contents of which are herein incorporated by reference in their entirety.

### Ionizable Lipid

[0250] Exemplary ionizable lipids are described in the US patent publications Nos. U.S. 2016/0311759, U.S. 2015/0376115, U.S. 2016/0151284, U.S. 2017/0210697, U.S. 2015/0140070, U.S. 2013/0178541, U.S. 2013/0303587, U.S. 2015/0141678, U.S. 2015/0239926, U.S. 2016/0376224, U.S. 2017/0119904, U.S. 2012/0149894, U.S. 2015/0057373, U.S. 2013/0090372, U.S. 2013/0274523, U.S. 2013/0274504, U.S. 2013/0274504, U.S. 2009/0023673, U.S. 2012/0128760, U.S. 2010/03241240, U.S. 2014/0200257. U.S. 2015/0203446, U.S. 2018/0005363, U.S. 2014/0308304, U.S. 2013/0338210, U.S. 2012/0101148, U.S. 2012/0027796, U.S. 2012/0058144, U.S. 2013/0323269. U.S. 2011/0117125, U.S. 2011/0256175, U.S. 2012/0202871, U.S. 2011/0076335, U.S. 2006/0083780, U.S. 2013/0123338, U.S. 2015/0064242, U.S. 2006/0051405, U.S. 2013/0065939, U.S. 2006/0008910, U.S. 2003/0022649, U.S. 2010/0130588, U.S. 2013/0116307, U.S. 2010/0062967, U.S. 2013/0202684, U.S. 2014/0141070, U.S. 2014/0255472, U.S. 2014/0039032, U.S. 2018/0028664, U.S. 2016/0317458, U.S. 2013/0195920, U.S. 2022/0062175, U.S. 2021/0121411, U.S. 2022/0009878, U.S. 2022/0040325, U.S. 2012/61657480, U.S. 2016/0074514, U.S. 2013/0330401, U.S. 2019/0185410, U.S. 2012/61617468, U.S. 2019/0032087, U.S. 2015/62184188, U.S. 2019/0127318, U.S. 2021/0002813, U.S. 2020/0345641, U.S. 2014/61944336, U.S. 2012/61657480, U.S. 2021/0059953, U.S. 2022/0162521, U.S. 2022/0235377, U.S. 2018/0085474, U.S. 2018/0000953, U.S. 2020/0129445, U.S. 2021/0145982, U.S. 2021/0378980, U.S. 2020/0254086, U.S. 2021/0346306, and U.S. 2018/0000953, the contents of all of which are incorporated herein by reference in their entirety.

[0251] In some embodiments, the nanoparticle comprises an ionizable lipid in a molar ratio of from 0% to 80%. In some embodiments, the ionizable lipid can be present in a molar ratio of at least 0%, (e.g., at least 5%, at least 10%, at least 20%, at least 30%, at least 40%, at least 50%, at least 60%, at least 70%, or at least 80%). In some embodiments, the ionizable lipid can be present in a molar ratio of 80% or less, (e.g., 80% or less, 70% or less, 60% or less, 50% or less, 40% or less, 30% or less, 20% or less, 10% or less, 5% or less, 1% or less, or 0.5% or less).

[0252] The ionizable lipid can be present in a molar ratio ranging from any of the minimum values described above to any of the maximum values described above. For example, in some embodiments, the ionizable lipid can be present in a molar ratio of from 0% to 80% (e.g., from greater than 0% to 80%, from greater than 0% to 70%, from greater than 0% to 60%, from greater than 0% to 50%, from greater than 0% to 40%, from greater than 0% to 30%, from greater than 0% to 20%, from greater than 0% to 10%, from greater than 0% to 5%, from greater than 0% to 1%, from greater than 0% to 0.5%, from 1% to 30%, from 1% to 20%, from 1% to 10%, from 1% to 5%, from 5% to 30%, from 5% to 20%, from 5% to 10%, from 10% to 30%, from 10% to 20%, from 20% to 30%, from 20% to 40%, or from 30% to 40%).

### Helper Lipid

[0253] In some embodiments, the nanoparticle comprises a helper lipid. In some embodiments, the helper lipid can be a non-cationic lipid. In some embodiments, the non-cationic lipid can include, but is not limited to, 1,2-dioleoyl-sn-glycero-3-phosphoethanolamine (DOPE), 1-palmitoyl-2-oleoyl-sn-glycero-3-phosphoethanolamine (POPE), 1,2-distearoyl-sn-glycero-3-phosphocholine (DSPC), 1-stearoyl-2-oleoyl-sn-glycero-3-phosphoethanolamine (SOPE), DPPC (1,2-dipalmitoyl-sn-glycero-3-phosphocholine), 1,2-dioleyl-sn-glycero-3-phosphotidylcholine (DOPC), 1,2-dipalmitoyl-sn-glycero-3-phosphoethanolamine (DPPE), 1,2-dimyristoyl-sn-glycero-3-phosphoethanolamine (DMPE), 1,2-dioleoyl-5/7-glycero-3-phospho-(l′-rac-glycerol) (DOPG), or combinations thereof. In one embodiment, the non-cationic lipid is 1,2-dioleoyl-sn-glycero-3-phosphoethanolamine (DOPE). In one embodiment, the non-cationic lipid is 1-palmitoyl-2-oleoyl-sn-glycero-3-phosphoethanolamine (POPE), In one embodiment, the non-cationic lipid is 1,2-distearoyl-sn-glycero-3-phosphocholine (DSPC). In one embodiment, the non-cationic lipid is 1-stearoyl-2-oleoyl-sn-glycero-3-phosphoethanolamine (SOPE). While several non-cationic lipids are described here, additional non-cationic lipids can be used in combination with the compounds disclosed herein.

[0254] In some embodiments, the nanoparticle comprises a helper lipid in a molar ratio of from 0% to 20%. In some embodiments, the nanoparticle comprises a polyethylene glycol-lipid in a molar ratio of about 0%, 0.25%, 0.5%, 0.75%, 1%, 1.5%, 2%, 3%, 4%, 5%, 10%, 15%, or 20%.

### Polyethylene Glycol-Lipid

[0255] In some embodiments, the nanoparticle includes a polyethylene glycol-lipid (PEG-lipid). PEG-lipid is incorporated to form a hydrophilic outer layer and stabilize the particles. Nonlimiting examples of polyethylene glycol-lipids include PEG-modified lipids such as PEG-modified phosphatidylethanolamines, PEG-modified phosphatidic acids, PEG-modified ceramides, PEG-modified dialkylamines. PEG-modified diacylglycerols, and PEG-modified dialkylglycerols. Representative polyethylene glycol-lipids include DMG-PEG, DLPE-PEGs, DMPE-PEGs, DPPC-PEGs, and DSPE-PEGs. In one embodiment, the polyethylene glycol-lipid is 1,2-dimyristoyl-sn-glycerol, methoxypolyethylene glycol (DMG-PEG). In one embodiment, the polyethylene glycol-lipid is 1,2-dimyristoyl-sn-glycerol, methoxypolyethylene glycol-2000 (DMG-PEG2000). DMG-PEGXXXX means 1,2-dimyristoyl-sn-glycerol, methoxypolyethylene glycol-XXXX, wherein XXXX signifies the molecular weight of the polyethylene glycol moiety, e.g. DMG-PEG2000 or DMG-PEG5000.

[0256] In some embodiments, the nanoparticle comprises a polyethylene glycol-lipid in a molar ratio of from 0% to 5%. In some embodiments, the nanoparticle comprises a polyethylene glycol-lipid in a molar ratio of about 0%, 0.25%, 0.5%, 0.75%, 1%, 1.5%, 2%, 3%, 4%, or 5%. In one embodiment, the nanoparticle comprises a polyethylene glycol-lipid in a molar ratio of 0.75%.

[0257] In some embodiments, the ratio of PEG in the lipid nanoparticle formulations may be increased or decreased and/or the carbon chain length of the PEG lipid may be modified from C14 to C18 to alter the pharmacokinetics and/or biodistribution of the lipid nanoparticle formulations. As a non-limiting example, lipid nanoparticle formulations may contain 0.5% to 3.0%, 1.0% to 3.5%, 1.5% to 4.0%, 2.0% to 4.5%, 2.5% to 5.0% and/or 3.0% to 5.0% of the lipid molar ratio of PEG-c-DOMG (R-3-[(ω-methoxy-poly(ethyleneglycol) 2000) carbamoyl)]-1,2-dimyristyloxypropyl-3-amine) (also referred to herein as PEG-DOMG) as compared to the cationic lipid, DSPC and cholesterol. In some embodiments, the PEG-c-DOMG may be replaced with a PEG lipid such as, but not limited to, PEG-DSG (1,2-Distearoyl-sn-glycerol, methoxypolyethylene glycol), PEG-DMG (1,2-Dimyristoyl-sn-glycerol) and/or PEG-DPG (1,2-Dipalmitoyl-sn-glycerol, methoxypolyethylene glycol).

[0258] In some embodiments, the LNP formulations may contain PEG-c-DOMG at 3% lipid molar ratio. In some embodiments, the LNP formulations may contain PEG-c-DOMG at 1.5% lipid molar ratio.

[0259] In some embodiments, the pharmaceutical compositions may include at least one of the PEGylated lipids described in International Publication No. WO2012099755, the contents of which are herein incorporated by reference in their entirety.

[0260] In some embodiments, the LNP formulation may contain PEG-DMG 2000 (1,2-dimyristoyl-sn-glycero-3-phophoethanolamine-N-[methoxy (polyethylene glycol)-2000). In some embodiments, the LNP formulation may contain PEG-DMG 2000, a cationic lipid known in the art and at least one other component. In some embodiments, the LNP formulation may contain PEG-DMG 2000, a cationic lipid known in the art, DSPC and cholesterol. As a non-limiting example, the LNP formulation may contain PEG-DMG 2000, DLin-DMA, DSPC and cholesterol. As another non-limiting example the LNP formulation may contain PEG-DMG 2000, DLin-DMA, DSPC and cholesterol in a molar ratio of 2:40:10:48 (see e.g., Geall et al., Nonviral delivery of self-amplifying RNA (e.g., mRNA) vaccines, PNAS 2012; PMID: 22908294, the contents of each of which are herein incorporated by reference in their entirety).

### Sterol

[0261] In some embodiments, the nanoparticle includes a sterol. Sterols are well known to those skilled in the art and generally refers to those compounds having a perhydrocyclopentanophenanthrene ring system and having one or more OH substituents. Examples of sterols include, but are not limited to, cholesterol, campesterol, ergosterol, sitosterol, and the like.

[0262] In some embodiments, the sterol is selected from a cholesterol-based lipid. In some embodiments, the one or more cholesterol-based lipids are selected from cholesterol, PEGylated cholesterol, DC-Choi (N,N-dimethyl-N-ethylcarboxamidocholesterol), 1,4-bis(3-N-oleylamino-propyl) piperazine, or combinations thereof.

[0263] The sterol can be used to tune the particle permeability and fluidity base on its function in cell membranes. In one embodiment, the sterol is cholesterol.

[0264] In some embodiments, the nanoparticle comprises a sterol in a molar ratio of from 20% to 80%. In some embodiments, the nanoparticle comprises a sterol in a molar ratio of 25%, 30%, 35%, 40%, 45%, or 50%. In one embodiment, the nanoparticle comprises a sterol in a molar ratio of 40%.

[0265] The nanoparticle formulations may be a carbohydrate nanoparticle comprising a carbohydrate carrier and a nucleic acid sequence (e.g., mRNA) described herein. As a non-limiting example, the carbohydrate carrier may include, but is not limited to, an anhydride-modified phytoglycogen or glycogen-type material, phtoglycogen octenyl succinate, phytoglycogen beta-dextrin, anhydride-modified phytoglycogen beta-dextrin. (See e.g., International Publication No. WO2012109121; the contents of which are herein incorporated by reference in their entirety).

[0266] Nanoparticle formulations of the present disclosure may be coated with a surfactant or polymer in order to improve the delivery of the particle. In some embodiments, the nanoparticle may be coated with a hydrophilic coating such as, but not limited to, PEG coatings and/or coatings that have a neutral surface charge. The hydrophilic coatings may help to deliver nanoparticles with larger payloads such as, but not limited to, RNA (e.g., mRNA) within the central nervous system. As a non-limiting example nanoparticles comprising a hydrophilic coating and methods of making such nanoparticles are described in U.S. Patent Publication No. US20130183244, the contents of which are herein incorporated by reference in their entirety.

[0267] In some embodiments, the lipid nanoparticles of the present disclosure may be hydrophilic polymer particles. Non-limiting examples of hydrophilic polymer particles and methods of making hydrophilic polymer particles are described in U.S. Patent Publication No. US20130210991, the contents of which are herein incorporated by reference in their entirety.

[0268] In some embodiments, the lipid nanoparticles of the present disclosure may be hydrophobic polymer particles.

[0269] In some embodiments, an immune response may be elicited by delivering a lipid nanoparticle which may include a nanospecies, a polymer and an immunogen. (U.S. Publication No. 20120189700 and International Publication No. WO2012099805; each of which is herein incorporated by reference in their entirety). The polymer may encapsulate the nanospecies or partially encapsulate the nanospecies. The immunogen may be a recombinant protein, a modified RNA and/or a polynucleotide described herein. In some embodiments, the lipid nanoparticle may be formulated for use in a vaccine such as, but not limited to, against a pathogen.

[0270] Lipid nanoparticles may be engineered to alter the surface properties of particles so the lipid nanoparticles may penetrate the mucosal barrier. Mucus is located on mucosal tissue such as, but not limited to, oral (e.g., the buccal and esophageal membranes and tonsil tissue), ophthalmic, gastrointestinal (e.g., stomach, small intestine, large intestine, colon, rectum), nasal, respiratory (e.g., nasal, pharyngeal, tracheal and bronchial membranes), genital (e.g., vaginal, cervical and urethral membranes). Nanoparticles larger than 10-200 nm which are preferred for higher drug encapsulation efficiency and the ability to provide the sustained delivery of a wide array of drugs have been thought to be too large to rapidly diffuse through mucosal barriers. Mucus is continuously secreted, shed, discarded or digested and recycled so most of the trapped particles may be removed from the mucosa tissue within seconds or within a few hours. Large polymeric nanoparticles (200 nm-500 nm in diameter) which have been coated densely with a low molecular weight polyethylene glycol (PEG) diffused through mucus only 4 to 6-fold lower than the same particles diffusing in water (Lai et al. PNAS 2007 104 (5): 1482-487; Lai et al. Adv Drug Deliv Rev. 2009 61 (2): 158-171; each of which is herein incorporated by reference in their entirety). The transport of nanoparticles may be determined using rates of permeation and/or fluorescent microscopy techniques including, but not limited to, fluorescence recovery after photobleaching (FRAP) and high resolution multiple particle tracking (MPT). As a non-limiting example, compositions which can penetrate a mucosal barrier may be made as described in U.S. Pat. No. 8,241,670 or International Patent Publication No. WO2013110028, the contents of each of which are herein incorporated by reference in its entirety.

[0271] The lipid nanoparticle engineered to penetrate mucus may comprise a polymeric material (i.e. a polymeric core) and/or a polymer-vitamin conjugate and/or a tri-block co-polymer. The polymeric material may include, but is not limited to, polyamines, polyethers, polyamides, polyesters, polycarbamates, polyureas, polycarbonates, poly(styrenes), polyimides, polysulfones, polyurethanes, polyacetylenes, polyethylenes, polyethyeneimines, polyisocyanates, polyacrylates, polymethacrylates, polyacrylonitriles, and polyarylates. The polymeric material may be biodegradable and/or biocompatible. Non-limiting examples of biocompatible polymers are described in International Patent Publication No. WO2013116804, the contents of which are herein incorporated by reference in their entirety. The polymeric material may additionally be irradiated. As a non-limiting example, the polymeric material may be gamma irradiated (see e.g., International App. No. WO201282165, herein incorporated by reference in its entirety). Non-limiting examples of specific polymers include poly(caprolactone) (PCL), ethylene vinyl acetate polymer (EVA), poly(lactic acid) (PLA), poly(L-lactic acid) (PLLA), poly(glycolic acid) (PGA), poly(lactic acid-co-glycolic acid) (PLGA), poly(L-lactic acid-co-glycolic acid) (PLLGA), poly(D,L-lactide) (PDLA), poly(L-lactide) (PLLA), poly(D,L-lactide-co-caprolactone), poly(D,L-lactide-co-caprolactone-co-glycolide), poly(D,L-lactide-co-PEO-co-D,L-lactide), poly(D,L-lactide-co-PPO-co-D,L-lactide), polyalkyl cyanoacralate, polyurethane, poly-L-lysine (PLL), hydroxypropyl methacrylate (HPMA), polyethyleneglycol, poly-L-glutamic acid, poly(hydroxy acids), polyanhydrides, polyorthoesters, poly(ester amides), polyamides, poly(ester ethers), polycarbonates, polyalkylenes such as polyethylene and polypropylene, polyalkylene glycols such as poly(ethylene glycol) (PEG), polyalkylene oxides (PEO), polyalkylene terephthalates such as poly(ethylene terephthalate), polyvinyl alcohols (PVA), polyvinyl ethers, polyvinyl esters such as poly(vinyl acetate), polyvinyl halides such as poly(vinyl chloride) (PVC), polyvinylpyrrolidone, polysiloxanes, polystyrene (PS), polyurethanes, derivatized celluloses such as alkyl celluloses, hydroxyalkyl celluloses, cellulose ethers, cellulose esters, nitro celluloses, hydroxypropylcellulose, carboxymethylcellulose, polymers of acrylic acids, such as poly(methyl(meth)acrylate) (PMMA), poly(ethyl(meth)acrylate), poly(butyl(meth)acrylate), poly(isobutyl(meth)acrylate), poly(hexyl(meth)acrylate), poly(isodecyl(meth)acrylate), poly(lauryl(meth)acrylate), poly(phenyl(meth)acrylate), poly(methyl acrylate), poly(isopropyl acrylate), poly(isobutyl acrylate), poly(octadecyl acrylate) and copolymers and mixtures thereof, polydioxanone and its copolymers, polyhydroxyalkanoates, polypropylene fumarate, polyoxymethylene, poloxamers, poly(ortho) esters, poly(butyric acid), poly(valeric acid), poly(lactide-co-caprolactone), PEG-PLGA-PEG and trimethylene carbonate, polyvinylpyrrolidone. The lipid nanoparticle may be coated or associated with a co-polymer such as, but not limited to, a block co-polymer (such as a branched polyether-polyamide block copolymer described in International Publication No. WO2013012476, herein incorporated by reference in its entirety), and (poly(ethylene glycol))-(poly(propylene oxide))-(poly(ethylene glycol))triblock copolymer (see e.g., U.S. Publication 20120121718 and U.S. Publication 20100003337 and U.S. Pat. No. 8,263,665, the contents of each of which is herein incorporated by reference in their entirety). The co-polymer may be a polymer that is generally regarded as safe (GRAS) and the formation of the lipid nanoparticle may be in such a way that no new chemical entities are created. For example, the lipid nanoparticle may comprise poloxamers coating PLGA nanoparticles without forming new chemical entities which are still able to rapidly penetrate human mucus (Yang et al. Angew. Chem. Int. Ed. 2011 50:2597-2600; the contents of which are herein incorporated by reference in their entirety). A non-limiting scalable method to produce nanoparticles which can penetrate human mucus is described by Xu et al. (see, e.g., J Control Release 2013, 170 (2): 279-86; the contents of which are herein incorporated by reference in their entirety).

[0272] The vitamin of the polymer-vitamin conjugate may be vitamin E. The vitamin portion of the conjugate may be substituted with other suitable components such as, but not limited to, vitamin A, vitamin E, other vitamins, cholesterol, a hydrophobic moiety, or a hydrophobic component of other surfactants (e.g., sterol chains, fatty acids, hydrocarbon chains and alkylene oxide chains).

[0273] The lipid nanoparticle engineered to penetrate mucus may include surface altering agents such as, but not limited to, polynucleotides, anionic proteins (e.g., bovine serum albumin), surfactants (e.g., cationic surfactants such as for example dimethyldioctadecylammonium bromide), sugars or sugar derivatives (e.g., cyclodextrin), nucleic acids, polymers (e.g., heparin, polyethylene glycol and poloxamer), mucolytic agents (e.g., N-acetylcysteine, mugwort, bromelain, papain, clerodendrum, acetylcysteine, bromhexine, carbocisteine, eprazinone, mesna, ambroxol, sobrerol, domiodol, letosteine, stepronin, tiopronin, gelsolin, thymosin β4 dornase alfa, neltenexine, erdosteine) and various DNases including rhDNase. The surface altering agent may be embedded or enmeshed in the particle's surface or disposed (e.g., by coating, adsorption, covalent linkage, or other process) on the surface of the lipid nanoparticle. (see e.g., U.S. Publication 20100215580 and U.S. Publication 20080166414 and US20130164343; the contents of each of which are herein incorporated by reference in their entirety).

[0274] In some embodiments, the mucus penetrating lipid nanoparticles may comprise at least one polynucleotide described herein. The polynucleotide may be encapsulated in the lipid nanoparticle and/or disposed on the surface of the particle. The polynucleotide may be covalently coupled to the lipid nanoparticle. Formulations of mucus penetrating lipid nanoparticles may comprise a plurality of nanoparticles.

[0275] In some embodiments, the compositions can be formulated as a solid lipid nanoparticle. A solid lipid nanoparticle (SLN) may be spherical with an average diameter between 10 to 1000 nm. SLN possess a solid lipid core matrix that can solubilize lipophilic molecules and may be stabilized with surfactants and/or emulsifiers. In some embodiments, the lipid nanoparticle may be a self-assembly lipid-polymer nanoparticle (see Zhang et al., ACS Nano, 2008, 2 (8), pp 1696-1702; the contents of which are herein incorporated by reference in their entirety). As a non-limiting example, the SLN may be the SLN described in International Patent Publication No. WO2013105101, the contents of which are herein incorporated by reference in their entirety. As another non-limiting example, the SLN may be made by the methods or processes described in International Patent Publication No. WO2013105101, the contents of which are herein incorporated by reference in their entirety.

[0276] In some embodiments, the compositions of the present disclosure may be encapsulated in a nanoparticle. Nanoparticles may be formulated by methods described herein and known in the art such as, but not limited to, International Pub Nos. WO2010005740, WO2010030763, WO2010005721, WO2010005723, WO2012054923, U.S. Publication Nos. US20110262491, US20100104645, US20100087337, US20100068285, US20110274759, US20100068286, US20120288541, US20130123351 and US20130230567 and U.S. Pat. Nos. 8,206,747, 8,293,276, 8,318,208 and 8,318,211; the contents of each of which are herein incorporated by reference in their entirety. In some embodiments, polymer nanoparticles may be identified by the methods described in US Pub No. US20120140790, the contents of which are herein incorporated by reference in their entirety.

[0277] In some embodiments, the nanoparticle may be formulated for sustained release. As used herein, “sustained release” refers to a pharmaceutical composition or compound that conforms to a release rate over a specific period of time. The period of time may include, but is not limited to, hours, days, weeks, months and years. As a non-limiting example, the sustained release nanoparticle may comprise a polymer and nucleic acid sequence of the present disclosure (see International Pub No. 2010075072 and US Pub No. US20100216804, US20110217377 and US20120201859, the contents of each of which are incorporated herein by reference in their entirety). In another non-limiting example, the sustained release formulation may comprise agents which permit persistent bioavailability such as, but not limited to, crystals, macromolecular gels and/or particulate suspensions (see U.S. Patent Publication No US20130150295, the contents of each of which are incorporated herein by reference in their entirety).

[0278] In some embodiments, the nanoparticles of the present disclosure may comprise a polymeric matrix. As a non-limiting example, the nanoparticle may comprise two or more polymers such as, but not limited to, polyethylenes, polycarbonates, polyanhydrides, polyhydroxyacids, polypropylfumerates, polycaprolactones, polyamides, polyacetals, polyethers, polyesters. poly(orthoesters), polycyanoacrylates, polyvinyl alcohols, polyurethanes, polyphosphazenes, polyacrylates, polymethacrylates, polycyanoacrylates, polyureas, polystyrenes, polyamines, polylysine, poly(ethylene imine), poly(serine ester), poly(L-lactide-co-L-lysine), poly(4-hydroxy-L-proline ester) or combinations thereof.

[0279] In some embodiments, the nanoparticle comprises a diblock copolymer. In some embodiments, the diblock copolymer may include PEG in combination with a polymer such as, but not limited to, polyethylenes, polycarbonates, polyanhydrides, polyhydroxyacids, polypropylfumerates, polycaprolactones, polyamides, polyacetals, polyethers, polyesters, poly(orthoesters), polycyanoacrylates, polyvinyl alcohols, polyurethanes, polyphosphazenes, polyacrylates, polymethacrylates, polycyanoacrylates, polyureas, polystyrenes, polyamines, polylysine. poly(ethylene imine), poly(serine ester), poly(L-lactide-co-L-lysine), poly(4-hydroxy-L-proline ester) or combinations thereof. In yet another embodiment, the diblock copolymer may be a high-X diblock copolymer such as those described in International Patent Publication No. WO2013120052, the contents of which are incorporated herein by reference in their entirety.

[0280] As a non-limiting example, the nanoparticle comprises a PLGA-PEG block copolymer (see U.S. Publication No. US20120004293 and U.S. Pat. No. 8,236,330, each of which is herein incorporated by reference in their entirety). In another non-limiting example, the therapeutic nanoparticle is a stealth nanoparticle comprising a diblock copolymer of PEG and PLA or PEG and PLGA (see U.S. Pat. No. 8,246,968 and International Publication No. WO2012166923, the contents of each of which are herein incorporated by reference in their entirety). In yet another non-limiting example, the nanoparticle is a stealth nanoparticle or a target-specific stealth nanoparticle as described in U.S. Patent Publication No. US20130172406, the contents of which are herein incorporated by reference in their entirety.

[0281] In some embodiments, the nanoparticle may comprise a multiblock copolymer (see e.g., U.S. Pat. Nos. 8,263,665 and 8.287,910 and U.S. Patent Pub. No. US20130195987, the contents of each of which are herein incorporated by reference in their entirety).

[0282] In yet another non-limiting example, the lipid nanoparticle comprises the block copolymer PEG-PLGA-PEG (see e.g., the thermosensitive hydrogel (PEG-PLGA-PEG) was used as a TGF-beta1 gene delivery vehicle in Lee et al. Thermosensitive Hydrogel as a Tgf-β1 Gene Delivery Vehicle Enhances Diabetic Wound Healing. Pharmaceutical Research, 2003 20(12):1995-2000; as a controlled gene delivery system in Li et al. Controlled Gene Delivery System Based on Thermosensitive Biodegradable Hydrogel. Pharmaceutical Research 2003 20(6):884-888; and Chang et al., Non-ionic amphiphilic biodegradable PEG-PLGA-PEG copolymer enhances gene delivery efficiency in rat skeletal muscle. J Controlled Release. 2007 118:245-253, the contents of each of which are herein incorporated by reference in their entirety). The nucleic acid (e.g., mRNA) vaccines of the present disclosure may be formulated in lipid nanoparticles comprising the PEG-PLGA-PEG block copolymer.

[0283] In some embodiments, the nanoparticle may comprise a multiblock copolymer (see e.g., U.S. Pat. Nos. 8,263,665 and 8,287,910 and U.S. Patent Pub. No. US20130195987, the contents of each of which are herein incorporated by reference in their entirety).

[0284] In some embodiments, the block copolymers described herein may be included in a polyion complex comprising a non-polymeric micelle and the block copolymer. (see e.g., U.S. Publication No. 20120076836, the contents of which are herein incorporated by reference in their entirety).

[0285] In some embodiments, the nanoparticle may comprise at least one acrylic polymer. Acrylic polymers include but are not limited to, acrylic acid, methacrylic acid, acrylic acid and methacrylic acid copolymers, methyl methacrylate copolymers, ethoxyethyl methacrylates, cyanoethyl methacrylate, amino alkyl methacrylate copolymer, poly(acrylic acid), poly(methacrylic acid), polycyanoacrylates and combinations thereof.

[0286] In some embodiments, the nanoparticles may comprise at least one poly(vinyl ester) polymer. The poly(vinyl ester) polymer may be a copolymer such as a random copolymer. As a non-limiting example, the random copolymer may have a structure such as those described in International Application No. WO2013032829 or U.S. Patent Publication No US20130121954, the contents of each of which are herein incorporated by reference in their entirety. In some embodiments, the poly(vinyl ester) polymers may be conjugated to the polynucleotides described herein.

[0287] In some embodiments, the nanoparticle may include at least one diblock copolymer. The diblock copolymer may be, but it not limited to, a poly(lactic) acid-poly(ethylene)glycol copolymer (see, e.g., International Patent Publication No. WO2013044219, the contents of which are herein incorporated by reference in their entirety). As a non-limiting example, the nanoparticle may be used to treat cancer (see International publication No. WO2013044219, the contents of which are herein incorporated by reference in their entirety).

[0288] In some embodiments, the nanoparticles may include at least one cationic polymer described herein and/or known in the art.

[0289] In some embodiments, the nanoparticles may include at least one amine-containing polymer such as, but not limited to polylysine, polyethylene imine, poly(amidoamine) dendrimers, poly(beta-amino esters) (see, e.g., U.S. Pat. No. 8,287,849, the contents of which are herein incorporated by reference in their entirety) and combinations thereof.

[0290] In some embodiments, the nanoparticles may comprise at least one degradable polyester which may contain polycationic side chains. Degradeable polyesters include, but are not limited to, poly(serine ester), poly(L-lactide-co-L-lysine), poly(4-hydroxy-L-proline ester), and combinations thereof. In some embodiments, the degradable polyesters may include a PEG conjugation to form a PEGylated polymer.

[0291] In some embodiments, the compositions may be formulated in colloid nanocarriers as described in U.S. Patent Publication No. US20130197100, the contents of which are herein incorporated by reference in their entirety.

[0292] In some embodiments, the nanoparticle may be optimized for oral administration. The nanoparticle may comprise at least one cationic biopolymer such as, but not limited to, chitosan or a derivative thereof. As a non-limiting example, the nanoparticle may be formulated by the methods described in U.S. Publication No. 20120282343, the contents of which are herein incorporated by reference in their entirety.

[0293] In some embodiments, LNPs comprise the lipid KL52 (an amino-lipid disclosed in U.S. Application Publication No. 2012/0295832, the contents of which are herein incorporated by reference in their entirety. Activity and/or safety (as measured by examining one or more of ALT/AST, white blood cell count and cytokine induction, for example) of LNP administration may be improved by incorporation of such lipids. LNPs comprising KL52 may be administered intravenously and/or in one or more doses. In some embodiments, administration of LNPs comprising KL52 results in equal or improved mRNA and/or protein expression as compared to LNPs comprising MC3.

[0294] In some embodiments, the lipid nanoparticle may be a limit size lipid nanoparticle described in International Patent Publication No. WO2013059922, the contents of which are herein incorporated by reference in their entirety. The limit size lipid nanoparticle may comprise a lipid bilayer surrounding an aqueous core or a hydrophobic core; where the lipid bilayer may comprise a phospholipid such as, but not limited to, diacylphosphatidylcholine, a diacylphosphatidylethanolamine, a ceramide, a sphingomyelin, a dihydrosphingomyelin, a cephalin, a cerebroside, a C8-C20 fatty acid diacylphophatidylcholine, and 1-palmitoyl-2-oleoyl phosphatidylcholine (POPC). In some embodiments, the limit size lipid nanoparticle may comprise a polyethylene glycol-lipid such as, but not limited to, DLPE-PEG, DMPE-PEG, DPPC-PEG and DSPE-PEG.

[0295] In some embodiments, the compositions may be formulated in a nanoparticle comprising an inner core comprising a non-cellular material and an outer surface comprising a cellular membrane. The cellular membrane may be derived from a cell or a membrane derived from a virus. As a non-limiting example, the nanoparticle may be made by the methods described in International Patent Publication No. WO2013052167, the contents of which are herein incorporated by reference in their entirety. As another non-limiting example, the nanoparticle described in International Patent Publication No. WO2013052167, the contents of which are herein incorporated by reference in their entirety, may be used to deliver the compositions described herein.

[0296] In some embodiments, the compositions may be formulated in porous nanoparticle-supported lipid bilayers (protocells). Protocells are described in International Patent Publication No. WO2013056132, the contents of which are herein incorporated by reference in their entirety.

[0297] In some embodiments, the compositions described herein may be formulated in polymeric nanoparticles as described in or made by the methods described in U.S. Pat. Nos. 8,420,123 and 8,518,963 and European Patent No. EP2073848B1, the contents of each of which are herein incorporated by reference in their entirety. As a non-limiting example, the polymeric nanoparticle may have a high glass transition temperature such as the nanoparticles described in or nanoparticles made by the methods described in U.S. Pat. No. 8,518,963, the contents of which are herein incorporated by reference in their entirety. As another non-limiting example, the polymer nanoparticle for oral and parenteral formulations may be made by the methods described in European Patent No. EP2073848B1, the contents of which are herein incorporated by reference in their entirety.

[0298] In some embodiments, the compositions described herein may be formulated in nanoparticles used in imaging. The nanoparticles may be liposome nanoparticles such as those described in U.S. Patent Publication No US20130129636, herein incorporated by reference in its entirety. As a non-limiting example, the liposome may comprise gadolinium (III) 2-{4,7-bis-carboxymethyl-10-[(N,N-distearylamidomethyl-N′-amido-methyl]-1,4,7,10-tetra-azacyclododec-1-yl}-acetic acid and a neutral, fully saturated phospholipid component (see, e.g., U.S. Patent Publication No US20130129636, the contents of which are herein incorporated by reference in their entirety).

[0299] In some embodiments, the nanoparticles which may be used in the present disclosure are formed by the methods described in U.S. Patent Application No. US20130130348, the contents of which are herein incorporated by reference in their entirety.

[0300] In some embodiments, the compositions of the present disclosure may be formulated in a swellable nanoparticle. The swellable nanoparticle may be, but is not limited to, those described in U.S. Pat. No. 8,440,231, the contents of which are herein incorporated by reference in their entirety. As a non-limiting embodiment, the swellable nanoparticle may be used for delivery of the RNA (e.g., mRNA) vaccines of the present disclosure to the pulmonary system (see, e.g., U.S. Pat. No. 8,440,231, the contents of which are herein incorporated by reference in their entirety).

[0301] The compositions of the present disclosure may be formulated in polyanhydride nanoparticles such as, but not limited to, those described in U.S. Pat. No. 8,449,916, the contents of which are herein incorporated by reference in their entirety.

[0302] The nanoparticles and microparticles of the present disclosure may be geometrically engineered to modulate macrophage and/or the immune response. In some embodiments, the geometrically engineered particles may have varied shapes, sizes and/or surface charges in order to incorporated the polynucleotides of the present disclosure for targeted delivery such as, but not limited to, pulmonary delivery (see, e.g., International Publication No WO2013082111, the contents of which are herein incorporated by reference in their entirety). Other physical features the geometrically engineering particles may have include, but are not limited to, fenestrations, angled arms, asymmetry and surface roughness, charge which can alter the interactions with cells and tissues. As a non-limiting example, nanoparticles of the present disclosure may be made by the methods described in International Publication No WO2013082111, the contents of which are herein incorporated by reference in their entirety.

[0303] In some embodiments, the nanoparticles of the present disclosure may be water soluble nanoparticles such as, but not limited to, those described in International Publication No. WO2013090601, the contents of which are herein incorporated by reference in their entirety. The nanoparticles may be inorganic nanoparticles which have a compact and zwitterionic ligand in order to exhibit good water solubility. The nanoparticles may also have small hydrodynamic diameters (HD), stability with respect to time, pH, and salinity and a low level of non-specific protein binding.

[0304] In some embodiments, the nanoparticles of the present disclosure may be developed by the methods described in U.S. Patent Publication No. US20130172406, the contents of which are herein incorporated by reference in their entirety.

[0305] In some embodiments, the nanoparticles of the present disclosure are stealth nanoparticles or target-specific stealth nanoparticles such as, but not limited to, those described in U.S. Patent Publication No. US20130172406, the contents of which are herein incorporated by reference in their entirety. The nanoparticles of the present disclosure may be made by the methods described in U.S. Patent Publication No. US20130172406, the contents of which are herein incorporated by reference in their entirety.

[0306] In some embodiments, the stealth or target-specific stealth nanoparticles may comprise a polymeric matrix. The polymeric matrix may comprise two or more polymers such as, but not limited to, polyethylenes, polycarbonates, polyanhydrides, polyhydroxyacids, polypropylfumerates, polycaprolactones, polyamides, polyacetals, polyethers, polyesters, poly(orthoesters), polycyanoacrylates, polyvinyl alcohols, polyurethanes, polyphosphazenes, polyacrylates, polymethacrylates, polycyanoacrylates, polyureas, polystyrenes, polyamines, polyesters, polyanhydrides, polyethers, polyurethanes, polymethacrylates, polyacrylates, polycyanoacrylates or combinations thereof.

[0307] In some embodiments, the nanoparticle may be a nanoparticle-nucleic acid hybrid structure having a high-density nucleic acid layer. As a non-limiting example, the nanoparticle-nucleic acid hybrid structure may made by the methods described in U.S. Patent Publication No. US20130171646, the contents of which are herein incorporated by reference in their entirety. The nanoparticle may comprise a nucleic acid such as, but not limited to, polynucleotides described herein and/or known in the art.

[0308] At least one of the nanoparticles of the present disclosure may be embedded in the core a nanostructure or coated with a low density porous 3-D structure or coating which is capable of carrying or associating with at least one payload within or on the surface of the nanostructure. Non-limiting examples of the nanostructures comprising at least one nanoparticle are described in International Patent Publication No. WO2013123523, the contents of which are herein incorporated by reference in their entirety.

[0309] In some embodiments, compositions may be delivered using smaller LNPs. Such particles may comprise a diameter from below 0.1 μm up to 100 nm such as, but not limited to, less than 0.1 μm, less than 1.0 μm, less than 5 μm, less than 10 μm, less than 15 μm, less than 20 μm, less than 25 μm, less than 30 μm, less than 35 μm, less than 40 μm, less than 50 μm, less than 55 μm, less than 60 μm, less than 65 μm, less than 70 μm, less than 75 μm, less than 80 μm, less than 85 μm, less than 90 μm, less than 95 μm, less than 100 μm, less than 125 μm, less than 150 μm, less than 175 μm, less than 200 μm, less than 225 μm, less than 250 μm, less than 275 μm, less than 300 μm, less than 325 μm, less than 350 μm, less than 375 μm, less than 400 μm, less than 425 μm, less than 450 μm, less than 475 μm, less than 500 μm, less than 525 μm, less than 550 μm, less than 575 μm, less than 600 μm, less than 625 μm, less than 650 μm, less than 675 μm, less than 700 μm, less than 725 μm, less than 750 μm, less than 775 μm, less than 800 μm, less than 825 μm, less than 850 μm, less than 875 μm, less than 900 μm, less than 925 μm, less than 950 μm, less than 975 μm, or less than 1000 μm.

[0310] In some embodiments, compositions may be delivered using smaller LNPs, which may comprise a diameter from about 1 nm to about 100 nm, from about 1 nm to about 10 nm, about 1 nm to about 20 nm, from about 1 nm to about 30 nm, from about 1 nm to about 40 nm, from about 1 nm to about 50 nm, from about 1 nm to about 60 nm, from about 1 nm to about 70 nm, from about 1 nm to about 80 nm, from about 1 nm to about 90 nm, from about 5 nm to about from 100 nm, from about 5 nm to about 10 nm, about 5 nm to about 20 nm, from about 5 nm to about 30 nm, from about 5 nm to about 40 nm, from about 5 nm to about 50 nm, from about 5 nm to about 60 nm, from about 5 nm to about 70 nm, from about 5 nm to about 80 nm, from about 5 nm to about 90 nm, about 10 to about 50 nm, from about 20 to about 50 nm, from about 30 to about 50 nm, from about 40 to about 50 nm, from about 20 to about 60 nm, from about 30 to about 60 nm, from about 40 to about 60 nm, from about 20 to about 70 nm, from about 30 to about 70 nm. from about 40 to about 70 nm, from about 50 to about 70 nm, from about 60 to about 70 nm, from about 20 to about 80 nm, from about 30 to about 80 nm, from about 40 to about 80 nm, from about 50 to about 80 nm, from about 60 to about 80 nm, from about 20 to about 90 nm, from about 30 to about 90 nm, from about 40 to about 90 nm, from about 50 to about 90 nm, from about 60 to about 90 nm and/or from about 70 to about 90 nm.

[0311] In some embodiments, such LNPs are synthesized using methods comprising microfluidic mixers. Examples of microfluidic mixers may include, but are not limited to, a slit interdigital micromixer including, but not limited to those manufactured by Microinnova (Allerheiligen bei Wildon, Austria) and/or a staggered herringbone micromixer (SHM) (Zhigaltsev, I. V. et al., Bottom-up design and synthesis of limit size lipid nanoparticle systems with aqueous and triglyceride cores using millisecond microfluidic mixing have been published (Langmuir. 2012. 28:3633-40; Belliveau, N. M. et al., Microfluidic synthesis of highly potent limit-size lipid nanoparticles for in vivo delivery of siRNA. Molecular Therapy-Nucleic Acids. 2012. 1: e37; Chen, D. et al., Rapid discovery of potent siRNA-containing lipid nanoparticles enabled by controlled microfluidic formulation. J Am Chem Soc. 2012. 134 (16): 6948-51, the contents of each of which are herein incorporated by reference in their entirety). In some embodiments, methods of LNP generation comprising SHM, further comprise the mixing of at least two input streams wherein mixing occurs by microstructure-induced chaotic advection (MICA). According to this method, fluid streams flow through channels present in a herringbone pattern causing rotational flow and folding the fluids around each other. This method may also comprise a surface for fluid mixing wherein the surface changes orientations during fluid cycling. Methods of generating LNPs using SHM include those disclosed in U.S. Application Publication Nos. 2004/0262223 and 2012/0276209, the contents of each of which are herein incorporated by reference in their entirety.

[0312] In some embodiments, the compositions of the present disclosure may be formulated in lipid nanoparticles created using a micromixer such as, but not limited to, a Slit Interdigital Microstructured Mixer (SIMM-V2) or a Standard Slit Interdigital Micro Mixer (SSIMM) or Caterpillar (CPMM) or Impinging-jet (IJMM) from the Institut für Mikrotechnik Mainz GmbH, Mainz Germany).

[0313] In some embodiments, the compositions of the present disclosure may be formulated in lipid nanoparticles created using microfluidic technology (see, e.g., Whitesides, George M. The Origins and the Future of Microfluidics. Nature, 2006 442:368-373; and Abraham et al. Chaotic Mixer for Microchannels. Science, 2002 295:647-651; each of which is herein incorporated by reference in its entirety). As a non-limiting example, controlled microfluidic formulation includes a passive method for mixing streams of steady pressure-driven flows in micro channels at a low Reynolds number (see, e.g., Abraham et al. Chaotic Mixer for Microchannels. Science, 2002 295:647-651, the contents of which are herein incorporated by reference in their entirety).

[0314] In some embodiments, the compositions of the present disclosure may be formulated in lipid nanoparticles created using a micromixer chip such as, but not limited to, those from Harvard Apparatus (Holliston, Mass.) or Dolomite Microfluidics (Royston, UK). A micromixer chip can be used for rapid mixing of two or more fluid streams with a split and recombine mechanism.

[0315] In some embodiments, the compositions of the disclosure may be formulated in lipid nanoparticles having a diameter from about 10 to about 100 nm such as, but not limited to, about 10 to about 20 nm, about 10 to about 30 nm, about 10 to about 40 nm, about 10 to about 50 nm, about 10 to about 60 nm, about 10 to about 70 nm, about 10 to about 80 nm, about 10 to about 90 nm, about 20 to about 30 nm, about 20 to about 40 nm, about 20 to about 50 nm, about 20 to about 60 nm, about 20 to about 70 nm, about 20 to about 80 nm, about 20 to about 90 nm, about 20 to about 100 nm, about 30 to about 40 nm, about 30 to about 50 nm, about 30 to about 60 nm, about 30 to about 70 nm, about 30 to about 80 nm, about 30 to about 90 nm, about 30 to about 100 nm, about 40 to about 50 nm, about 40 to about 60 nm, about 40 to about 70 nm, about 40 to about 80 nm, about 40 to about 90 nm, about 40 to about 100 nm, about 50 to about 60 nm, about 50 to about 70 nm about 50 to about 80 nm, about 50 to about 90 nm, about 50 to about 100 nm, about 60 to about 70 nm, about 60 to about 80 nm, about 60 to about 90 nm, about 60 to about 100 nm, about 70 to about 80 nm, about 70 to about 90 nm, about 70 to about 100 nm, about 80 to about 90 nm, about 80 to about 100 nm and/or about 90 to about 100 nm.

[0316] In some embodiments, the lipid nanoparticles may have a diameter from about 10 to 500 nm.

[0317] In some embodiments, the lipid nanoparticle may have a diameter greater than 100 nm, greater than 150 nm, greater than 200 nm, greater than 250 nm, greater than 300 nm, greater than 350 nm, greater than 400 nm, greater than 450 nm, greater than 500 nm, greater than 550 nm, greater than 600 nm, greater than 650 nm, greater than 700 nm, greater than 750 nm, greater than 800 nm, greater than 850 nm, greater than 900 nm, greater than 950 nm or greater than 1000 nm.

[0318] Described herein are also composition including an effective amount of a nanoparticle described herein and a pharmaceutically acceptable carrier. In some aspects, the pharmaceutical compositions can include a pharmaceutically acceptable carrier and a nanoparticle including a nucleic acid sequence (e.g., mRNA) encoding an infection agent antigenic polypeptide and a nucleic acid sequence (e.g., mRNA) encoding at least one universal T-cell epitope, as well as, compositions including a nucleic acid sequence (e.g., mRNA) encoding an infection agent antigenic polypeptide and at least one universal T-cell epitope. In some aspects, the pharmaceutical composition can include a pharmaceutically acceptable carrier and a lipid nanoparticle including an nucleic acid sequence (e.g., mRNA) encoding an infection agent antigenic polypeptide and a nucleic acid sequence (e.g., mRNA) encoding at least one universal T-cell epitope, as well as compositions including a nucleic acid sequence (e.g., mRNA) encoding an infection agent antigenic polypeptide and at least one universal T-cell epitope.

[0319] Liposomes, lipoplexes, or lipid nanoparticles may be used to improve the efficacy of polynucleotides directed protein production as these formulations may be able to increase cell transfection by the RNA (e.g., mRNA) polynucleotide; and/or increase the translation of encoded protein. One such example involves the use of lipid encapsulation to enable the effective systemic delivery of polyplex plasmid DNA (Heyes et al., Mol Ther. 2007 15:713-720; the contents of which are incorporated herein by reference in their entirety). The liposomes, lipoplexes, or lipid nanoparticles may also be used to increase the stability of the polynucleotide.

[0320] Liposomes are artificially-prepared vesicles which may primarily be composed of a lipid bilayer and may be used as a delivery vehicle for the administration of nutrients and pharmaceutical formulations. Liposomes can be of different sizes such as, but not limited to, a multilamellar vesicle (MLV) which may be hundreds of nanometers in diameter and may contain a series of concentric bilayers separated by narrow aqueous compartments, a small unicellular vesicle (SUV) which may be smaller than 50 nm in diameter, and a large unilamellar vesicle (LUV) which may be between 50 and 500 nm in diameter. Liposome design may include, but is not limited to, opsonins or ligands in order to improve the attachment of liposomes to unhealthy tissue or to activate events such as, but not limited to, endocytosis. Liposomes may contain a low or a high pH in order to improve the delivery of the pharmaceutical formulations.

[0321] The formation of liposomes may depend on the physicochemical characteristics such as, but not limited to, the pharmaceutical formulation entrapped and the liposomal ingredients, the nature of the medium in which the lipid vesicles are dispersed, the effective concentration of the entrapped substance and its potential toxicity, any additional processes involved during the application and/or delivery of the vesicles, the optimization size, polydispersity and the shelf-life of the vesicles for the intended application, and the batch-to-batch reproducibility and possibility of large-scale production of safe and efficient liposomal products.

[0322] In some embodiments, pharmaceutical compositions described herein may include, without limitation, liposomes such as those formed from 1,2-dioleyloxy-N,N-dimethylaminopropane (DODMA) liposomes, DiLa2 liposomes from Marina Biotech (Bothell, Wash.), 1,2-dilinoleyloxy-3-dimethylaminopropane (DLin-DMA), 2,2-dilinoleyl-4-(2-dimethylaminoethyl)-[1,3]-dioxolane (DLin-KC2-DMA), and MC3 (US20100324120; herein incorporated by reference in its entirety) and liposomes which may deliver small molecule drugs such as, but not limited to, DOXIL® from Janssen Biotech, Inc. (Horsham, Pa.).

[0323] In some embodiments, pharmaceutical compositions described herein may include, without limitation, liposomes such as those formed from the synthesis of stabilized plasmid-lipid particles (SPLP) or stabilized nucleic acid lipid particle (SNALP) that have been previously described and shown to be suitable for oligonucleotide delivery in vitro and in vivo (see Wheeler et al. Gene Therapy. 1999 6:271-281; Zhang et al. Gene Therapy. 1999 6:1438-1447; Jeffs et al. Pharm Res. 2005 22:362-372; Morrissey et al., Nat Biotechnol. 2005 2:1002-1007; Zimmermann et al., Nature. 2006 441:111-114; Heyes et al. J Contr Rel. 2005 107:276-287; Semple et al. Nature Biotech. 2010 28:172-176; Judge et al. J Clin Invest. 2009 119:661-673; deFougerolles Hum Gene Ther. 2008 19:125-132; U.S. Patent Publication No US20130122104; all of which are incorporated herein in their entireties). The original manufacture method by Wheeler et al. was a detergent dialysis method, which was later improved by Jeffs et al. and is referred to as the spontaneous vesicle formation method. The liposome formulations are composed of 3 to 4 lipid components in addition to the polynucleotide. As an example a liposome can contain, but is not limited to, 55% cholesterol, 20% disteroylphosphatidyl choline (DSPC), 10% PEG-S-DSG, and 15% 1,2-dioleyloxy-N,N-dimethylaminopropane (DODMA), as described by Jeffs et al. As another example, certain liposome formulations may contain. but are not limited to, 48% cholesterol, 20% DSPC, 2% PEG-c-DMA, and 30% cationic lipid, where the cationic lipid can be 1,2-distearloxy-N,N-dimethylaminopropane (DSDMA), DODMA, DLin-DMA, or 1,2-dilinolenyloxy-3-dimethylaminopropane (DLenDMA), as described by Heyes et al.

[0324] In some embodiments, liposome formulations may comprise from about 25.0% cholesterol to about 40.0% cholesterol, from about 30.0% cholesterol to about 45.0% cholesterol, from about 35.0% cholesterol to about 50.0% cholesterol and/or from about 48.5% cholesterol to about 60% cholesterol. In some embodiments, formulations may comprise a percentage of cholesterol selected from the group consisting of 28.5%, 31.5%, 33.5%, 36.5%, 37.0%, 38.5%, 39.0% and 43.5%. In some embodiments, formulations may comprise from about 5.0% to about 10.0% DSPC and/or from about 7.0% to about 15.0% DSPC.

[0325] In some embodiments, the compositions may be formulated in liposomes such as, but not limited to, DiLa2 liposomes (Marina Biotech, Bothell, Wash.), SMARTICLES® (Marina Biotech, Bothell, Wash.), neutral DOPC (1,2-dioleoyl-sn-glycero-3-phosphocholine) based liposomes (e.g., siRNA delivery for ovarian cancer (Landen et al. Cancer Biology & Therapy 2006 5 (12) 1708-1713); herein incorporated by reference in its entirety) and hyaluronan-coated liposomes (Quiet Therapeutics, Israel).

[0326] In some embodiments, the compositions may be formulated in a lipid vesicle, which may have crosslinks between functionalized lipid bilayers.

[0327] In some embodiments, the compositions may be formulated in a lipid-polycation complex. The formation of the lipid-polycation complex may be accomplished by methods known in the art and/or as described in U.S. Pub. No. 20120178702, herein incorporated by reference in its entirety. As a non-limiting example, the polycation may include a cationic peptide or a polypeptide such as, but not limited to, polylysine, polyornithine and/or polyarginine. In some embodiments, the compositions may be formulated in a lipid-polycation complex, which may further include a non-cationic lipid such as, but not limited to, cholesterol or dioleoyl phosphatidylethanolamine (DOPE).

[0328] In some embodiments, the composition can be formulated as a lipoplex, such as, without limitation, the ATUPLEX™ system, the DACC system, the DBTC system and other siRNA-lipoplex technology from Silence Therapeutics (London, United Kingdom), STEMFECT™ from STEMGENT® (Cambridge, Mass.), and polyethylenimine (PEI) or protamine-based targeted and non-targeted delivery of nucleic acids acids (Aleku et al. Cancer Res. 2008 68:9788-9798; Strumberg et al. Int J Clin Pharmacol Ther 2012 50:76-78; Santel et al., Gene Ther 2006 13:1222-1234; Santel et al., Gene Ther 2006 13:1360-1370; Gutbier et al., Pulm Pharmacol. Ther. 2010 23:334-344; Kaufmann et al. Microvasc Res 2010 80:286-293 Weide et al. J Immunother. 2009 32:498-507; Weide et al. J Immunother. 2008 31:180-188; Pascolo Expert Opin. Biol. Ther. 4:1285-1294; Fotin-Mleczek et al., 2011 J. Immunother. 34:1-15: Song et al., Nature Biotechnol. 2005, 23:709-717; Peer et al., Proc Natl Acad Sci USA. 2007 6; 104:4095-4100; deFougerolles Hum Gene Ther. 2008 19:125-132, the contents of each of which are incorporated herein by reference in their entirety).

[0329] In some embodiments, such formulations may also be constructed or compositions altered such that they passively or actively are directed to different cell types in vivo, including but not limited to hepatocytes, immune cells, tumor cells, endothelial cells, antigen presenting cells, and leukocytes (Akinc et al. Mol Ther. 2010 18:1357-1364; Song et al., Nat Biotechnol. 2005 23:709-717; Judge et al., J Clin Invest. 2009 119:661-673; Kaufmann et al., Microvasc Res 2010 80:286-293; Santel et al., Gene Ther 2006 13:1222-1234; Santel et al., Gene Ther 2006 13:1360-1370; Gutbier et al., Pulm Pharmacol. Ther. 2010 23:334-344; Basha et al., Mol. Ther. 2011 19:2186-2200; Fenske and Cullis, Expert Opin Drug Deliv. 2008 5:25-44; Peer et al., Science. 2008 319:627-630; Peer and Lieberman, Gene Ther. 2011 18:1127-1133, the contents of each of which are incorporated herein by reference in their entirety). One example of passive targeting of formulations to liver cells includes the DLin-DMA, DLin-KC2-DMA and DLin-MC3-DMA-based lipid nanoparticle formulations, which have been shown to bind to apolipoprotein E and promote binding and uptake of these formulations into hepatocytes in vivo (Akinc et al. Mol Ther. 2010 18:1357-1364, the contents of which are incorporated herein by reference in their entirety). Formulations can also be selectively targeted through expression of different ligands on their surface as exemplified by, but not limited by, folate, transferrin, N-acetylgalactosamine (GalNAc), and antibody targeted approaches (Kolhatkar et al., Curr Drug Discov Technol. 2011 8:197-206; Musacchio and Torchilin, Front Biosci. 2011 16:1388-1412; Yu et al., Mol Membr Biol. 2010 27:286-298; Patil et al., Crit Rev Ther Drug Carrier Syst. 2008 25:1-61; Benoit et al., Biomacromolecules. 2011 12:2708-2714; Zhao et al., Expert Opin Drug Deliv. 2008 5:309-319; Akinc et al., Mol Ther. 2010 18:1357-1364; Srinivasan et al., Methods Mol Biol. 2012 820:105-116; Ben-Arie et al., Methods Mol Biol. 2012 757:497-507; Peer 2010 J Control Release. 20:63-68; Peer et al., Proc Natl Acad Sci USA. 2007 104:4095-4100; Kim et al., Methods Mol Biol. 2011 721:339-353; Subramanya et al., Mol Ther. 2010 18:2028-2037; Song et al., Nat Biotechnol. 2005 23:709-717; Peer et al., Science. 2008 319:627-630; Peer and Lieberman, Gene Ther. 2011 18:1127-1133, the contents of each of which are incorporated herein by reference in their entirety).

[0330] In some embodiments, the composition of the present disclosure can be formulated for controlled release and/or targeted delivery. As used herein, “controlled release” refers to a pharmaceutical composition or compound release profile that conforms to a particular pattern of release to effect a therapeutic outcome. In some embodiments, the compositions may be encapsulated into a delivery agent described herein and/or known in the art for controlled release and/or targeted delivery. As used herein, the term “encapsulate” means to enclose, surround or encase. As it relates to the formulation of the compounds of the disclosure, encapsulation may be substantial, complete or partial. The term “substantially encapsulated” means that at least greater than 50, 60, 70, 80, 85, 90, 95, 96, 97, 98, 99, 99.9, 99.9 or greater than 99.999% of the pharmaceutical composition or compound of the disclosure may be enclosed, surrounded or encased within the delivery agent. “Partially encapsulation” means that less than 10, 10, 20, 30, 40 50 or less of the pharmaceutical composition or compound of the disclosure may be enclosed, surrounded or encased within the delivery agent. Advantageously, encapsulation may be determined by measuring the escape or the activity of the pharmaceutical composition or compound of the disclosure using fluorescence and/or electron micrograph. For example, at least 1, 5, 10, 20, 30, 40, 50, 60, 70, 80, 85, 90, 95, 96, 97, 98, 99, 99.9, 99.99 or greater than 99.99% of the pharmaceutical composition or compound of the disclosure are encapsulated in the delivery agent.

[0331] In some embodiments, the controlled release formulation may include, but is not limited to, tri-block co-polymers. As a non-limiting example, the formulation may include two different types of tri-block co-polymers (International Pub. No. WO2012131104 and

[0332] WO2012131106, the contents of each of which are incorporated herein by reference in their entirety).

[0333] In some embodiments, the compositions may be encapsulated into a lipid nanoparticle or a rapidly eliminated lipid nanoparticle and the lipid nanoparticles or a rapidly eliminated lipid nanoparticle may then be encapsulated into a polymer, hydrogel and/or surgical sealant described herein and/or known in the art. As a non-limiting example, the polymer, hydrogel or surgical sealant may be PLGA, ethylene vinyl acetate (EVAc), poloxamer, GELSITE® (Nanotherapeutics, Inc. Alachua, Fla.), HYLENEX® (Halozyme Therapeutics, San Diego Calif.), surgical sealants such as fibrinogen polymers (Ethicon Inc. Cornelia, Ga.), TISSELL® (Baxter International, Inc Deerfield, Ill.), PEG-based sealants, and COSEAL® (Baxter International, Inc Deerfield, Ill.).

[0334] In some embodiments, the compositions described herein formulated for controlled release and/or targeted delivery may also include at least one degradable polyester which may contain polycationic side chains. Degradable polyesters include, but are not limited to, poly(serine ester), poly(L-lactide-co-L-lysine), poly(4-hydroxy-L-proline ester), and combinations thereof. In some embodiments, the degradable polyesters may include a PEG conjugation to form a PEGylated polymer.

[0335] In some embodiments, the compositions described herein formulated for controlled release and/or targeted delivery may also include at least one PEG and/or PEG related polymer derivatives as described in U.S. Pat. No. 8,404,222, the contents of which are incorporated herein by reference in their entirety.

[0336] In some embodiments, the compositions described herein formulated for controlled release delivery may be the controlled release polymer system described in US20130130348, the contents of which are incorporated herein by reference in their entirety.

[0337] In some embodiments, the synthetic nanocarriers may be formulated for targeted release. In some embodiments, the synthetic nanocarrier is formulated to release the polynucleotides at a specified pH and/or after a desired time interval. As a non-limiting example, the synthetic nanoparticle may be formulated to release the RNA (e.g., mRNA) vaccines after 24 hours and/or at a pH of 4.5 (see International Publication Nos. WO2010138193 and WO2010138194 and US Pub Nos. US20110020388 and US20110027217, each of which is herein incorporated by reference in their entireties).

[0338] In some embodiments, the synthetic nanocarriers may be formulated for controlled and/or sustained release of the nucleic acids described herein. As a non-limiting example, the synthetic nanocarriers for sustained release may be formulated by methods known in the art, described herein and/or as described in International Pub No. WO2010138192 and US Pub No. 20100303850, each of which is herein incorporated by reference in their entirety.

[0339] In some embodiments, the synthetic nanocarrier may be formulated for use as a vaccine. In some embodiments, the synthetic nanocarrier may encapsulate at least one polynucleotide which encode at least one antigen. As a non-limiting example, the synthetic nanocarrier may include at least one antigen and an excipient for a vaccine dosage form (see International Publication No. WO2011150264 and U.S. Publication No. US20110293723, the contents of each of which are herein incorporated by reference in their entirety). As another non-limiting example, a vaccine dosage form may include at least two synthetic nanocarriers with the same or different antigens and an excipient (see International Publication No. WO2011150249 and U.S. Publication No. US20110293701, the contents of each of which are herein incorporated by reference in their entirety). The vaccine dosage form may be selected by methods described herein, known in the art and/or described in International Publication No. WO2011150258 and U.S. Publication No. US20120027806, the contents of each of which are herein incorporated by reference in their entirety).

[0340] In some embodiments, the synthetic nanocarrier may encapsulate at least one polynucleotide that encodes a peptide, fragment or region from a virus. As a non-limiting example, the synthetic nanocarrier may include, but is not limited to, any of the nanocarriers described in International Publication No. WO2012024621, WO201202629, WO2012024632 and U.S. Publication No. US20120064110, US20120058153 and US20120058154, the contents of each of which are herein incorporated by reference in their entirety.

[0341] In some embodiments, the compositions may be formulated in colloid nanocarriers as described in U.S. Patent Publication No. US20130197100, the contents of which are herein incorporated by reference in their entirety.

[0342] In some embodiments, the compositions of the disclosure may be formulated for delivery using the drug encapsulating microspheres described in International Patent Publication No. WO2013063468 or U.S. Pat. No. 8,440,614, the contents of each of which are herein incorporated by reference in their entirety. The microspheres may comprise a compound of the formula (I), (II), (III), (IV), (V) or (VI) as described in International Patent Publication No. WO2013063468, the contents of which are herein incorporated by reference in their entirety. In some embodiments, the amino acid, peptide, polypeptide, lipids (APPL) are useful in delivering the RNA (e.g., mRNA) polynucleotides of the disclosure to cells (see International Patent Publication No. WO2013063468, the contents of which are herein incorporated by reference in their entirety).

[0343] In some embodiments, the compositions may be delivered, localized and/or concentrated in a specific location using the delivery methods described in International Patent Publication No. WO2013063530, the contents of which are herein incorporated by reference in their entirety. As a non-limiting example, a subject may be administered an empty polymeric particle prior to, simultaneously with or after delivering the nucleic acid (e.g., mRNA) compositions to the subject. The empty polymeric particle undergoes a change in volume once in contact with the subject and becomes lodged, embedded, immobilized or entrapped at a specific location in the subject.

[0344] In some embodiments, the compositions may be formulated in an active substance release system (see, e.g., U.S. Patent Publication No. US20130102545, the contents of which are herein incorporated by reference in their entirety). The active substance release system may comprise 1) at least one nanoparticle bonded to an oligonucleotide inhibitor strand which is hybridized with a catalytically active nucleic acid and 2) a compound bonded to at least one substrate molecule bonded to a therapeutically active substance (e.g., polynucleotides described herein), where the therapeutically active substance is released by the cleavage of the substrate molecule by the catalytically active nucleic acid.

[0345] In some embodiments the compositions may be associated with a cationic or polycationic compounds, including protamine, nucleoline, spermine or spermidine, or other cationic peptides or proteins, such as poly-L-lysine (PLL), polyarginine, basic polypeptides, cell penetrating peptides (CPPs), including HIV-binding peptides, HIV-1 Tat (HIV), Tat-derived peptides, Penetratin, VP22 derived or analog peptides, Pestivirus Ems, HSV, VP22 (Herpes simplex), MAP, KALA or protein transduction domains (PTDs), PpT620, prolin-rich peptides, arginine-rich peptides, lysine-rich peptides, MPG-peptide(s), Pep-1, L-oligomers, Calcitonin peptide(s), Antennapedia-derived peptides (particularly from Drosophila antennapedia), pAntp, plsl, FGF, Lactoferrin, Transportan, Buforin-2, Bac715-24, SynB, SynB (1), pVEC, hCT-derived peptides, SAP, histones, cationic polysaccharides, for example chitosan, polybrene, cationic polymers, e.g. polyethyleneimine (PEI), cationic lipids, e.g. DOTMA: [1-(2,3-sioleyloxy)propyl)]-N,N,N-trimethylammonium chloride, DMRIE, di-C14-amidine, DOTIM, SAINT, DC-Chol, BGTC, CTAP, DOPC, DODAP, DOPE: Dioleyl phosphatidylethanol-amine, DOSPA, DODAB, DOIC, DMEPC, DOGS: Dioctadecylamidoglicylspermin, DIMRI: Dimyristooxypropyl dimethyl hydroxyethyl ammonium bromide, DOTAP: dioleoyloxy-3-(trimethylammonio) propane, DC-6-14: O,O-ditetradecanoyl-N-.alpha.-trimethylammonioacetyl) diethanolamine chloride, CLIP 1: rac-[(2,3-dioctadecyloxypropyl) (2-hydroxyethyl)]-dimethylammonium chloride, CLIP6: rac-[2 (2,3-dihexadecyloxypropyloxymethyloxy)ethyl]-trimethylammonium, CLIP9: rac-[2 (2,3-dihexadecyloxypropyloxysuccinyloxy)ethyl]-trimethylammonium, oligofectamine, or cationic or polycationic polymers, e.g. modified polyaminoacids, such as beta-aminoacid-polymers or reversed polyamides, etc., modified polyethylenes, such as PVP (poly(N-ethyl-4-vinylpyridinium bromide)), etc., modified acrylates, such as pDMAEMA (poly(dimethylaminoethyl methylacrylate)), etc., modified amidoamines such as pAMAM (poly(amidoamine)), etc., modified polybetaminoester (PBAE), such as diamine end modified 1,4 butanediol diacrylate-co-5-amino-1-pentanol polymers, etc., dendrimers, such as polypropylamine dendrimers or pAMAM based dendrimers, etc., polyimine(s), such as PEI: poly(ethyleneimine), poly(propyleneimine), etc., polyallylamine, sugar backbone based polymers, such as cyclodextrin based polymers, dextran based polymers, chitosan, etc., silan backbone based polymers, such as PMOXA-PDMS copolymers, etc., blockpolymers consisting of a combination of one or more cationic blocks (e.g. selected from a cationic polymer as mentioned above) and of one or more hydrophilic or hydrophobic blocks (e.g. polyethyleneglycole), etc.

[0346] In other embodiments, the composition is not associated with a cationic or polycationic compound.

### Vaccines

[0347] Described herein are vaccines including the compositions described herein. In some aspects, described herein are vaccines including a nucleic acid sequence (e.g., mRNA) encoding an infection agent antigenic polypeptide and a nucleic acid sequence (e.g., mRNA) encoding at least one universal T-cell epitope, as well as, vaccines including a nucleic acid sequence (e.g., mRNA) encoding an infection agent antigenic polypeptide and at least one universal T-cell epitope.

[0348] The vaccines described herein, can include multiple nucleic acid sequences (e.g., mRNA), each encoding a single infection agent antigenic polypeptide and multiple nucleic acid sequences (e.g., mRNA), each encoding a single universal T-cell epitope, as well as, vaccines including a single nucleic acid sequence (e.g., mRNA) encoding one or more infection agent antigenic polypeptide and a single nucleic acid sequence (e.g., mRNA) encoding one or more universal T-cell epitope.

[0349] The vaccines described herein, can include multiple nucleic acid sequences (e.g., mRNA), each encoding a single infection agent antigenic polypeptide and a single universal T-cell epitope, as well as, vaccines including a single nucleic acid sequence (e.g., mRNA) encoding one or more infection agent antigenic polypeptide and one or more universal T-cell epitope.

[0350] The vaccines of the present disclosure, in some embodiments, include 2-10 (e.g., 2, 3, 4, 5, 6, 7, 8, 9 or 10), or more, nucleic acid sequences having an open reading frame, each of which encodes a different infection agent antigenic polypeptide (or a single nucleic acid sequence encoding 2-10, or more, different infection agent antigenic polypeptides). The vaccines of the present disclosure, in some embodiments, include 2-10 (e.g., 2, 3, 4, 5, 6, 7, 8, 9 or 10), or more, nucleic acid sequence having an open reading frame, each of which encodes a different universal T-cell epitope (or a single nucleic acid sequence encoding 2-10, or more, different universal T-cell epitopes).

[0351] In some embodiments, vaccines can be formulated in a nanoparticle described herein. In some embodiments, vaccines can be formulated in a lipid nanoparticle described herein. In some embodiments, vaccines can be formulated in a lipid-polycation complex described herein, referred to as a cationic lipid nanoparticle. The vaccines of the disclosure can be formulated using one or more liposomes, lipoplexes, or lipid nanoparticles described herein. In some embodiments, pharmaceutical compositions of vaccines can include liposomes described herein. In some embodiments, the vaccines may be formulated in a lipid vesicle, which may have crosslinks between functionalized lipid bilayers. In some embodiments, the vaccines may be formulated in a lipid-polycation complex.

[0352] In some embodiments, the nucleic acid sequence encoding the infection agent antigenic polypeptide can elicit an antibody response in a subject. In some embodiments, the nucleic acid sequence encoding the infection agent antigenic polypeptide can elicit a broad T-cell response in a subject. In some embodiments, the nucleic acid sequence encoding the infection agent antigenic polypeptide can elicit both an antibody response and a T-cell response in a subject.

[0353] In some embodiments, the nucleic acid sequence encoding the infection agent antigenic polypeptide can elicit a cellular immune response, a humoral immune response, or a combination thereof. In some embodiments, the nucleic acid sequence encoding the infection agent antigenic polypeptide can elicit a cellular immune response, a humoral immune response, or a combination thereof, without risking the possibility of insertional mutagenesis.

[0354] In some embodiments, the universal T-cell epitope can provide broader protection against infection agent variants.

[0355] In some embodiments, the vaccine can include a nucleic acid sequence (e.g., mRNA) encoding a human Metapneumovirus (hMPV) antigenic polypeptide, human parainfluenza viruses (hPIV) types 1, 2, and 3 (hPIV1, hPIV2 and hPIV3, respectively) antigenic polypeptide, respiratory syncytial virus (RSV) antigenic polypeptide, measles virus (MeV) antigenic polypeptide, varicella-zoster antigenic polypeptide, influenza virus antigenic polypeptide, herpes simplex virus 1 (HSV1) antigenic polypeptide, herpes simplex virus 2 (HSV2) antigenic polypeptide, poxvirus (e.g., smallpox, monkeypox) antigenic polypeptide, cytomegalovirus antigenic polypeptide, Epstein-Barr virus antigenic polypeptide, rotavirus antigenic polypeptide, rhinovirus antigenic polypeptide, adenovirus antigenic polypeptide, papillomavirus antigenic polypeptide, poliovirus antigenic polypeptide, mumps antigenic polypeptide, rabies antigenic polypeptide, rubella antigenic polypeptide, coxsackieviruses antigenic polypeptide, equine encephalitis antigenic polypeptide, Japanese encephalitis antigenic polypeptide, yellow fever antigenic polypeptide, Rift Valley fever antigenic polypeptide, hepatitis A, B, C, D, and E virus antigenic polypeptide, coronaviruses (e.g., MERS-COV, SARS-COV, SARS-COV2, HCoV-OC43, HCOV-229E, HCoV-NL63, HCoV-NL, HCoV-NH, HCoV-HKU1) antigenic polypeptide (see, e.g., Esper F. et al. Emerging Infectious Diseases, 12 (5). 2006; and Pyrc K. et al. Journal of Virology, 81 (7): 3051-57, 2007, the contents of each of which is here incorporated by reference in their entirety), African swine fever (ASF) antigenic polypeptide, foot-and-mouth disease virus (FMDV) antigenic polypeptide, feline herpesvirus-1/feline viral rhinotracheitis antigenic polypeptide, canine distemper antigenic polypeptide, feline coronavirus (FCOV) antigenic polypeptide, or any combination thereof.

[0356] In some embodiments, the vaccine can include a nucleic acid sequence (e.g., mRNA) encoding monkeypox antigenic polypeptide, herpes simplex virus 1 (HSV1) antigenic polypeptide, herpes simplex virus 2 (HSV2) antigenic polypeptide, coronavirus (e.g., SARS-CoV2) antigenic polypeptide, or any combination thereof.

[0357] In some embodiments, the vaccine can include a nucleic acid sequence (e.g., mRNA) encoding a human Metapneumovirus (hMPV) antigenic polypeptide, human parainfluenza viruses (hPIV) types 1, 2, and 3 (hPIV1, hPIV2 and hPIV3, respectively) antigenic polypeptide, respiratory syncytial virus (RSV) antigenic polypeptide, measles virus (MeV) antigenic polypeptide, varicella-zoster antigenic polypeptide, influenza virus antigenic polypeptide, herpes simplex virus 1 (HSV1) antigenic polypeptide, herpes simplex virus 2 (HSV2) antigenic polypeptide, poxvirus (e.g., smallpox, monkeypox) antigenic polypeptide, cytomegalovirus antigenic polypeptide, Epstein-Barr virus antigenic polypeptide, rotavirus antigenic polypeptide, rhinovirus antigenic polypeptide, adenovirus antigenic polypeptide, papillomavirus antigenic polypeptide, poliovirus antigenic polypeptide, mumps antigenic polypeptide, rabies antigenic polypeptide, rubella antigenic polypeptide, coxsackieviruses antigenic polypeptide, equine encephalitis antigenic polypeptide, Japanese encephalitis antigenic polypeptide, yellow fever antigenic polypeptide, Rift Valley fever antigenic polypeptide, hepatitis A, B, C, D, and E virus antigenic polypeptide, coronaviruses (e.g., MERS-COV, SARS-COV, SARS-COV2, HCoV-OC43, HCOV-229E, HCoV-NL63, HCoV-NL, HCOV-NH, HCoV-HKU1) antigenic polypeptide (see, e.g., Esper F. et al. Emerging Infectious Diseases, 12 (5), 2006; and Pyrc K. et al. Journal of Virology, 81(7):3051-57, 2007, the contents of each of which is here incorporated by reference in their entirety), African swine fever (ASF) antigenic polypeptide, foot-and-mouth disease virus (FMDV) antigenic polypeptide, feline herpesvirus-1/feline viral rhinotracheitis antigenic polypeptide, canine distemper antigenic polypeptide, or any combination thereof.

[0358] In some embodiments, the vaccine can include a nucleic acid sequence (e.g., mRNA) encoding a human Metapneumovirus (hMPV) antigenic polypeptide, human parainfluenza viruses (hPIV) types 1, 2, and 3 (hPIV1, hPIV2 and hPIV3, respectively) antigenic polypeptide, respiratory syncytial virus (RSV) antigenic polypeptide, measles virus (MeV) antigenic polypeptide, varicella-zoster antigenic polypeptide, influenza virus antigenic polypeptide, herpes simplex virus 1 (HSV1) antigenic polypeptide, herpes simplex virus 2 (HSV2) antigenic polypeptide, poxvirus (e.g., smallpox, monkeypox) antigenic polypeptide, cytomegalovirus antigenic polypeptide, Epstein-Barr virus antigenic polypeptide, rotavirus antigenic polypeptide, rhinovirus antigenic polypeptide, adenovirus antigenic polypeptide, papillomavirus antigenic polypeptide, poliovirus antigenic polypeptide, mumps antigenic polypeptide, rabies antigenic polypeptide, rubella antigenic polypeptide, coxsackieviruses antigenic polypeptide, equine encephalitis antigenic polypeptide, Japanese encephalitis antigenic polypeptide, yellow fever antigenic polypeptide, Rift Valley fever antigenic polypeptide, hepatitis A, B, C, D, and E virus antigenic polypeptide, African swine fever (ASF) antigenic polypeptide, foot-and-mouth disease virus (FMDV) antigenic polypeptide, feline herpesvirus-1/feline viral rhinotracheitis antigenic polypeptide, canine distemper antigenic polypeptide, feline coronavirus (FCoV) antigenic polypeptide, or any combination thereof.

[0359] In some embodiments, the vaccine can include a nucleic acid sequence (e.g., mRNA) encoding a human Metapneumovirus (hMPV) antigenic polypeptide, human parainfluenza viruses (hPIV) types 1, 2, and 3 (hPIV1, hPIV2 and hPIV3, respectively) antigenic polypeptide, respiratory syncytial virus (RSV) antigenic polypeptide, measles virus (MeV) antigenic polypeptide, varicella-zoster antigenic polypeptide, influenza virus antigenic polypeptide, poxvirus (e.g., smallpox. monkeypox) antigenic polypeptide, cytomegalovirus antigenic polypeptide, Epstein-Barr virus antigenic polypeptide, rotavirus antigenic polypeptide, rhinovirus antigenic polypeptide, adenovirus antigenic polypeptide, papillomavirus antigenic polypeptide, poliovirus antigenic polypeptide, mumps antigenic polypeptide, rabies antigenic polypeptide, rubella antigenic polypeptide, coxsackieviruses antigenic polypeptide, equine encephalitis antigenic polypeptide, Japanese encephalitis antigenic polypeptide, yellow fever antigenic polypeptide, Rift Valley fever antigenic polypeptide, hepatitis A, B, C, D, and E virus antigenic polypeptide, coronaviruses (e.g., MERS-COV, SARS-COV, SARS-COV2, HCoV-OC43, HCOV-229E, HCoV-NL63, HCOV-NL, HCOV-NH, HCoV-HKU1) antigenic polypeptide (see, e.g., Esper F. et al. Emerging Infectious Diseases, 12 (5), 2006; and Pyrc K. et al. Journal of Virology, 81 (7): 3051-57, 2007, the contents of each of which is here incorporated by reference in their entirety), African swine fever (ASF) antigenic polypeptide, foot-and-mouth disease virus (FMDV) antigenic polypeptide, feline herpesvirus-1/feline viral rhinotracheitis antigenic polypeptide, canine distemper antigenic polypeptide, feline coronavirus (FCoV) antigenic polypeptide, or any combination thereof.

[0360] In some embodiments, the vaccine can include a nucleic acid sequence (e.g., mRNA) encoding a human Metapneumovirus (hMPV) antigenic polypeptide, human parainfluenza viruses (hPIV) types 1, 2, and 3 (hPIV1, hPIV2 and hPIV3, respectively) antigenic polypeptide, respiratory syncytial virus (RSV) antigenic polypeptide, measles virus (MeV) antigenic polypeptide, varicella-zoster antigenic polypeptide, influenza virus antigenic polypeptide, poxvirus (e.g., smallpox, monkeypox) antigenic polypeptide, cytomegalovirus antigenic polypeptide, Epstein-Barr virus antigenic polypeptide, rotavirus antigenic polypeptide, rhinovirus antigenic polypeptide, adenovirus antigenic polypeptide, papillomavirus antigenic polypeptide, poliovirus antigenic polypeptide, mumps antigenic polypeptide, rabies antigenic polypeptide, rubella antigenic polypeptide, coxsackieviruses antigenic polypeptide, equine encephalitis antigenic polypeptide, Japanese encephalitis antigenic polypeptide, yellow fever antigenic polypeptide, Rift Valley fever antigenic polypeptide, hepatitis A, B, C, D, and E virus antigenic polypeptide, coronaviruses (e.g., MERS-COV, SARS-COV, SARS-COV2, HCoV-OC43, HCOV-229E, HCoV-NL63, HCOV-NL, HCOV-NH, HCoV-HKU1) antigenic polypeptide (see, e.g., Esper F. et al. Emerging Infectious Diseases, 12 (5), 2006; and Pyrc K. et al. Journal of Virology, 81 (7): 3051-57, 2007, the contents of each of which is here incorporated by reference in their entirety), African swine fever (ASF) antigenic polypeptide, foot-and-mouth disease virus (FMDV) antigenic polypeptide, feline herpesvirus-1/feline viral rhinotracheitis antigenic polypeptide, canine distemper antigenic polypeptide, or any combination thereof.

[0361] In some embodiments, the vaccine can include a nucleic acid sequence (e.g., mRNA) encoding a human Metapneumovirus (hMPV) antigenic polypeptide, human parainfluenza viruses (hPIV) types 1, 2, and 3 (hPIV1, hPIV2 and hPIV3, respectively) antigenic polypeptide, respiratory syncytial virus (RSV) antigenic polypeptide, measles virus (MeV) antigenic polypeptide, varicella-zoster antigenic polypeptide, influenza virus antigenic polypeptide, poxvirus (e.g., smallpox, monkeypox) antigenic polypeptide, cytomegalovirus antigenic polypeptide, Epstein-Barr virus antigenic polypeptide, rotavirus antigenic polypeptide, rhinovirus antigenic polypeptide, adenovirus antigenic polypeptide, papillomavirus antigenic polypeptide, poliovirus antigenic polypeptide, mumps antigenic polypeptide, rabies antigenic polypeptide, rubella antigenic polypeptide, coxsackieviruses antigenic polypeptide, equine encephalitis antigenic polypeptide, Japanese encephalitis antigenic polypeptide, yellow fever antigenic polypeptide, Rift Valley fever antigenic polypeptide, hepatitis A, B, C, D, and E virus antigenic polypeptide, African swine fever (ASF) antigenic polypeptide. foot-and-mouth disease virus (FMDV) antigenic polypeptide, feline herpesvirus-1/feline viral rhinotracheitis antigenic polypeptide, canine distemper antigenic polypeptide, feline coronavirus (FCoV) antigenic polypeptide, or any combination thereof.

[0362] In some embodiments, the vaccine can include a nucleic acid sequence (e.g., mRNA) encoding a human Metapneumovirus (hMPV) antigenic polypeptide, human parainfluenza viruses (hPIV) types 1, 2, and 3 (hPIV1, hPIV2 and hPIV3, respectively) antigenic polypeptide, respiratory syncytial virus (RSV) antigenic polypeptide, measles virus (MeV) antigenic polypeptide, varicella-zoster antigenic polypeptide, influenza virus antigenic polypeptide, herpes simplex virus 1 (HSV1) antigenic polypeptide, herpes simplex virus 2 (HSV2) antigenic polypeptide, poxvirus (e.g., smallpox, monkeypox) antigenic polypeptide, cytomegalovirus antigenic polypeptide, Epstein-Barr virus antigenic polypeptide, rotavirus antigenic polypeptide, rhinovirus antigenic polypeptide, adenovirus antigenic polypeptide, papillomavirus antigenic polypeptide, poliovirus antigenic polypeptide, mumps antigenic polypeptide, rabies antigenic polypeptide, rubella antigenic polypeptide, coxsackieviruses antigenic polypeptide, equine encephalitis antigenic polypeptide, Japanese encephalitis antigenic polypeptide, yellow fever antigenic polypeptide, Rift Valley fever antigenic polypeptide, hepatitis A, B, C, D, and E virus antigenic polypeptide, African swine fever (ASF) antigenic polypeptide, foot-and-mouth disease virus (FMDV) antigenic polypeptide, feline herpesvirus-1/feline viral rhinotracheitis antigenic polypeptide, canine distemper antigenic polypeptide, or any combination thereof.

[0363] In some embodiments, the vaccine can include a nucleic acid sequence (e.g., mRNA) encoding monkeypox antigenic polypeptide. In some embodiments, the vaccine can include a nucleic acid sequence (e.g., mRNA) encoding herpes simplex virus 1 (HSV1) antigenic polypeptide. In some embodiments, the vaccine can include a nucleic acid sequence (e.g., mRNA) encoding herpes simplex virus 2 (HSV2) antigenic polypeptide. In some embodiments, the vaccine can include a nucleic acid sequence (e.g., mRNA) encoding coronavirus (e.g., SARS-COV2) antigenic polypeptide. In some embodiments, the vaccine can include a nucleic acid sequence (e.g., mRNA) encoding feline coronavirus (FCOV) antigenic polypeptide.

[0364] The present disclosure also provides, in some embodiments, combination vaccines where the nucleic acid sequence (e.g., mRNA) encodes more than one antigenic polypeptides selected from human Metapneumovirus (hMPV) antigenic polypeptide, human parainfluenza viruses (hPIV) types 1, 2, and 3 (hPIV1, hPIV2 and hPIV3, respectively) antigenic polypeptide, respiratory syncytial virus (RSV) antigenic polypeptide, measles virus (MeV) antigenic polypeptide, varicella-zoster antigenic polypeptide, influenza virus antigenic polypeptide, herpes simplex virus 1 (HSV1) antigenic polypeptide, herpes simplex virus 2 (HSV2) antigenic polypeptide, poxvirus (e.g., smallpox, monkeypox) antigenic polypeptide, cytomegalovirus antigenic polypeptide, Epstein-Barr virus antigenic polypeptide, rotavirus antigenic polypeptide, rhinovirus antigenic polypeptide, adenovirus antigenic polypeptide, papillomavirus antigenic polypeptide, poliovirus antigenic polypeptide, mumps antigenic polypeptide, rabies antigenic polypeptide, rubella antigenic polypeptide, coxsackieviruses antigenic polypeptide, equine encephalitis antigenic polypeptide, Japanese encephalitis antigenic polypeptide, yellow fever antigenic polypeptide, Rift Valley fever antigenic polypeptide, hepatitis A, B, C, D, and E virus antigenic polypeptide, coronaviruses (e.g., MERS-COV, SARS-COV2, SARS-COV2, HCoV-OC43, HCOV-229E, HCoV-NL63, HCoV-NL, HCOV-NH, HCoV-HKU1) antigenic polypeptide), African swine fever (ASF) antigenic polypeptide, foot-and-mouth disease virus (FMDV) antigenic polypeptide, feline herpesvirus-1/feline viral rhinotracheitis antigenic polypeptide, canine distemper antigenic polypeptide, feline coronavirus (FCoV) antigenic polypeptide, or any combination thereof.

[0365] In some embodiments, the combination vaccines where the nucleic acid sequence (e.g., mRNA) encodes more than one antigenic polypeptides selected from human Metapneumovirus (hMPV) antigenic polypeptide, human parainfluenza viruses (hPIV) types 1, 2, and 3 (hPIV1, hPIV2 and hPIV3, respectively) antigenic polypeptide, respiratory syncytial virus (RSV) antigenic polypeptide, measles virus (MeV) antigenic polypeptide, varicella-zoster antigenic polypeptide, influenza virus antigenic polypeptide, herpes simplex virus 1 (HSV1) antigenic polypeptide, herpes simplex virus 2 (HSV2) antigenic polypeptide, poxvirus (e.g., smallpox, monkeypox) antigenic polypeptide, cytomegalovirus antigenic polypeptide, Epstein-Barr virus antigenic polypeptide, rotavirus antigenic polypeptide, rhinovirus antigenic polypeptide, adenovirus antigenic polypeptide, papillomavirus antigenic polypeptide, poliovirus antigenic polypeptide, mumps antigenic polypeptide, rabies antigenic polypeptide, rubella antigenic polypeptide, coxsackieviruses antigenic polypeptide, equine encephalitis antigenic polypeptide, Japanese encephalitis antigenic polypeptide, yellow fever antigenic polypeptide, Rift Valley fever antigenic polypeptide, hepatitis A, B, C, D, and E virus antigenic polypeptide, coronaviruses (e.g., MERS-COV, SARS-COV, SARS-COV2, HCoV-OC43, HCOV-229E, HCoV-NL63, HCOV-NL, HCoV-NH, HCoV-HKU1) antigenic polypeptide, African swine fever (ASF) antigenic polypeptide, foot-and-mouth disease virus (FMDV) antigenic polypeptide, feline herpesvirus-1/feline viral rhinotracheitis antigenic polypeptide, canine distemper antigenic polypeptide, or any combination thereof.

[0366] In some embodiments, the combination vaccines where the nucleic acid sequence (e.g., mRNA) encodes more than one antigenic polypeptides selected from human Metapneumovirus (hMPV) antigenic polypeptide, human parainfluenza viruses (hPIV) types 1, 2, and 3 (hPIV1, hPIV2 and hPIV3, respectively) antigenic polypeptide, respiratory syncytial virus (RSV) antigenic polypeptide, measles virus (MeV) antigenic polypeptide, varicella-zoster antigenic polypeptide, influenza virus antigenic polypeptide, herpes simplex virus 1 (HSV1) antigenic polypeptide, herpes simplex virus 2 (HSV2) antigenic polypeptide, poxvirus (e.g., smallpox, monkeypox) antigenic polypeptide, cytomegalovirus antigenic polypeptide, Epstein-Barr virus antigenic polypeptide, rotavirus antigenic polypeptide, rhinovirus antigenic polypeptide, adenovirus antigenic polypeptide, papillomavirus antigenic polypeptide, poliovirus antigenic polypeptide, mumps antigenic polypeptide, rabies antigenic polypeptide, rubella antigenic polypeptide, coxsackieviruses antigenic polypeptide, equine encephalitis antigenic polypeptide, Japanese encephalitis antigenic polypeptide, yellow fever antigenic polypeptide, Rift Valley fever antigenic polypeptide, hepatitis A, B, C, D, and E virus antigenic polypeptide, African swine fever (ASF) antigenic polypeptide, foot-and-mouth disease virus (FMDV) antigenic polypeptide, feline herpesvirus-1/feline viral rhinotracheitis antigenic polypeptide, canine distemper antigenic polypeptide, feline coronavirus (FCoV) antigenic polypeptide, or any combination thereof.

[0367] In some embodiments, the combination vaccines where the nucleic acid sequence (e.g., mRNA) encodes more than one antigenic polypeptides selected from human Metapneumovirus (hMPV) antigenic polypeptide, human parainfluenza viruses (hPIV) types 1, 2, and 3 (hPIV1, hPIV2 and hPIV3, respectively) antigenic polypeptide, respiratory syncytial virus (RSV) antigenic polypeptide, measles virus (MeV) antigenic polypeptide, varicella-zoster antigenic polypeptide, influenza virus antigenic polypeptide, poxvirus (e.g., smallpox, monkeypox) antigenic polypeptide, cytomegalovirus antigenic polypeptide, Epstein-Barr virus antigenic polypeptide, rotavirus antigenic polypeptide, rhinovirus antigenic polypeptide, adenovirus antigenic polypeptide, papillomavirus antigenic polypeptide, poliovirus antigenic polypeptide, mumps antigenic polypeptide, rabies antigenic polypeptide, rubella antigenic polypeptide, coxsackieviruses antigenic polypeptide, equine encephalitis antigenic polypeptide, Japanese encephalitis antigenic polypeptide, yellow fever antigenic polypeptide, Rift Valley fever antigenic polypeptide, hepatitis A, B, C, D, and E virus antigenic polypeptide, coronaviruses (e.g., MERS-COV, SARS-COV, SARS-COV2, HCoV-OC43, HCoV-229E, HCoV-NL63, HCOV-NL, HCoV-NH, HCoV-HKU1) antigenic polypeptide, African swine fever (ASF) antigenic polypeptide, foot-and-mouth disease virus (FMDV) antigenic polypeptide, feline herpesvirus-1/feline viral rhinotracheitis antigenic polypeptide, canine distemper antigenic polypeptide, feline coronavirus (FCOV) antigenic polypeptide, or any combination thereof.

[0368] In some embodiments, the combination vaccines where the nucleic acid sequence (e.g., mRNA) encodes more than one antigenic polypeptides selected from human Metapneumovirus (hMPV) antigenic polypeptide, human parainfluenza viruses (hPIV) types 1, 2, and 3 (hPIV1, hPIV2 and hPIV3, respectively) antigenic polypeptide, respiratory syncytial virus (RSV) antigenic polypeptide, measles virus (MeV) antigenic polypeptide, varicella-zoster antigenic polypeptide, influenza virus antigenic polypeptide, poxvirus (e.g., smallpox, monkeypox) antigenic polypeptide, cytomegalovirus antigenic polypeptide, Epstein-Barr virus antigenic polypeptide, rotavirus antigenic polypeptide, rhinovirus antigenic polypeptide, adenovirus antigenic polypeptide, papillomavirus antigenic polypeptide, poliovirus antigenic polypeptide, mumps antigenic polypeptide, rabies antigenic polypeptide, rubella antigenic polypeptide, coxsackieviruses antigenic polypeptide, equine encephalitis antigenic polypeptide. Japanese encephalitis antigenic polypeptide, yellow fever antigenic polypeptide, Rift Valley fever antigenic polypeptide, hepatitis A, B, C, D, and E virus antigenic polypeptide, coronaviruses (e.g., MERS-COV, SARS-COV, SARS-COV2, HCoV-OC43, HCOV-229E, HCoV-NL63, HCOV-NL, HCOV-NH, HCoV-HKU1) antigenic polypeptide, African swine fever (ASF) antigenic polypeptide, foot-and-mouth disease virus (FMDV) antigenic polypeptide, feline herpesvirus-1/feline viral rhinotracheitis antigenic polypeptide. canine distemper antigenic polypeptide, or any combination thereof.

[0369] In some embodiments, the combination vaccines where the nucleic acid sequence (e.g., mRNA) encodes more than one antigenic polypeptides selected from human Metapneumovirus (hMPV) antigenic polypeptide, human parainfluenza viruses (hPIV) types 1, 2, and 3 (hPIV1, hPIV2 and hPIV3, respectively) antigenic polypeptide, respiratory syncytial virus (RSV) antigenic polypeptide, measles virus (MeV) antigenic polypeptide, varicella-zoster antigenic polypeptide, influenza virus antigenic polypeptide, poxvirus (e.g., smallpox, monkeypox) antigenic polypeptide, cytomegalovirus antigenic polypeptide, Epstein-Barr virus antigenic polypeptide, rotavirus antigenic polypeptide, rhinovirus antigenic polypeptide, adenovirus antigenic polypeptide, papillomavirus antigenic polypeptide, poliovirus antigenic polypeptide, mumps antigenic polypeptide, rabies antigenic polypeptide, rubella antigenic polypeptide, coxsackieviruses antigenic polypeptide, equine encephalitis antigenic polypeptide, Japanese encephalitis antigenic polypeptide, yellow fever antigenic polypeptide, Rift Valley fever antigenic polypeptide, hepatitis A, B, C, D, and E virus antigenic polypeptide, African swine fever (ASF) antigenic polypeptide, foot-and-mouth disease virus (FMDV) antigenic polypeptide, feline herpesvirus-1/feline viral rhinotracheitis antigenic polypeptide, canine distemper antigenic polypeptide, feline coronavirus (FCOV) antigenic polypeptide, or any combination thereof.

[0370] In some embodiments, the combination vaccines where the nucleic acid sequence (e.g., mRNA) encodes more than one antigenic polypeptides selected from human Metapneumovirus (hMPV) antigenic polypeptide, human parainfluenza viruses (hPIV) types 1, 2, and 3 (hPIV1, hPIV2 and hPIV3, respectively) antigenic polypeptide, respiratory syncytial virus (RSV) antigenic polypeptide, measles virus (MeV) antigenic polypeptide, varicella-zoster antigenic polypeptide, influenza virus antigenic polypeptide, herpes simplex virus 1 (HSV1) antigenic polypeptide, herpes simplex virus 2 (HSV2) antigenic polypeptide, poxvirus (e.g., smallpox, monkeypox) antigenic polypeptide, cytomegalovirus antigenic polypeptide, Epstein-Barr virus antigenic polypeptide, rotavirus antigenic polypeptide, rhinovirus antigenic polypeptide, adenovirus antigenic polypeptide, papillomavirus antigenic polypeptide, poliovirus antigenic polypeptide, mumps antigenic polypeptide, rabies antigenic polypeptide, rubella antigenic polypeptide, coxsackieviruses antigenic polypeptide, equine encephalitis antigenic polypeptide, Japanese encephalitis antigenic polypeptide, yellow fever antigenic polypeptide, Rift Valley fever antigenic polypeptide, hepatitis A, B, C, D, and E virus antigenic polypeptide, African swine fever (ASF) antigenic polypeptide, foot-and-mouth disease virus (FMDV) antigenic polypeptide, feline herpesvirus-1/feline viral rhinotracheitis antigenic polypeptide, canine distemper antigenic polypeptide, or any combination thereof.

[0371] In some embodiments, combination vaccines where the nucleic acid sequence (e.g., mRNA) encodes more than one infection agent antigenic polypeptides selected from hMPV antigenic polypeptides, PIV3 antigenic polypeptides, RSV antigenic polypeptides, MeV antigenic polypeptides and coronavirus antigenic polypeptides.

[0372] In some embodiments, the combination vaccines where the nucleic acid sequence (e.g. mRNA) encodes more than one infection agent antigenic polypeptide selected from monkeypox antigenic polypeptide, herpes simplex virus 1 (HSV1) antigenic polypeptide, herpes simplex virus 2 (HSV2) antigenic polypeptide, coronavirus (e.g., SARS-COV-2) antigenic polypeptide, or any combination thereof.

[0373] In some embodiments, the vaccines can further include pharmaceutically acceptable carrier.

[0374] In some embodiments, vaccine comprises an adjuvant, such as a flagellin adjuvant, as provided herein.

### Multiprotein and Multicomponent Vaccines

[0375] The compositions described herein, can include multiple nucleic acid sequences (e.g., mRNA), each encoding a single infection agent antigenic polypeptide and multiple nucleic acid sequences (e.g., mRNA), each encoding a single universal T-cell epitope, as well as compositions including a single nucleic acid sequence (e.g., mRNA) encoding one or more infection agent antigenic polypeptide and a single nucleic acid sequence (e.g., mRNA) encoding one or more universal T-cell epitope(s).

[0376] The compositions described herein, can include multiple nucleic acid sequences (e.g., mRNA) each encoding a single infection agent antigenic polypeptide and a single universal T-cell epitope, as well as, compositions including a single nucleic acid sequence (e.g., mRNA) encoding one or more infection agent antigenic polypeptide and one or more universal T-cell epitope(s).

[0377] Thus, a composition including a nucleic acid sequence encoding an infection agent antigenic polypeptide and at least one universal T-cell epitope, encompasses compositions that include a nucleic acid sequence encoding a first infection agent antigenic polypeptide, a second infection agent antigenic polypeptide, a first universal T-cell epitope, and a second universal T-cell epitope. In some embodiments, a composition including a nucleic acid sequence encoding an infection agent antigenic polypeptide and a nucleic acid sequence encoding at least one universal T-cell epitope, encompasses compositions that include a first nucleic acid sequence encoding a first infection agent antigenic polypeptide, a second nucleic acid sequence encoding a second infection agent antigenic polypeptide, a third nucleic acid sequence encoding a first universal T-cell epitope, and a fourth nucleic acid sequence encoding a second universal T-cell epitope.

[0378] The compositions described herein, in some embodiments, include 2-10 (e.g., 2, 3, 4, 5, 6, 7, 8, 9 or 10), or more, nucleic acid sequence (e.g. mRNA) having an open reading frame, each of which encodes a different infection agent antigenic polypeptide (or a single nucleic acid sequence (e.g. mRNA) encoding 2-10, or more, different infection agent antigenic polypeptides). The compositions described herein, in some embodiments, include 2-10 (e.g., 2, 3, 4, 5, 6, 7, 8, 9 or 10), or more, nucleic acid sequence (e.g. mRNA) having an open reading frame, each of which encodes a different universal T-cell epitope (or a single nucleic acid sequence (e.g. mRNA) encoding 2-10, or more, different universal T-cell epitopes).

[0379] In some embodiments, a vaccine comprises a nucleic acid sequence (e.g., mRNA) having an open reading frame encoding a viral capsid protein, a nucleic acid sequence (e.g., mRNA) having an open reading frame encoding a viral premembrane/membrane protein, and a nucleic acid sequence (e.g., mRNA) having an open reading frame encoding a viral envelope protein. In some embodiments, a vaccine comprises a nucleic acid sequence (e.g., mRNA) having an open reading frame encoding a viral fusion (F) protein and a nucleic acid sequence having an open reading frame encoding a viral major surface glycoprotein (G protein). In some embodiments, a vaccine comprises a nucleic acid sequence (e.g., mRNA) having an open reading frame encoding a viral F protein. In some embodiments, a vaccine comprises a nucleic acid sequence (e.g., mRNA) having an open reading frame encoding a viral G protein. In some embodiments, a vaccine comprises a nucleic acid sequence (e.g., mRNA) having an open reading frame encoding a HN protein.

[0380] In some embodiments, a multicomponent vaccine comprises a nucleic acid sequence (e.g., mRNA) encoding an infection agent antigenic polypeptide, and at least one universal T-cell epitope and a signal peptide (e.g., any one of SEQ ID NO: 15-19). In some embodiments, a multicomponent vaccine comprises a nucleic acid sequence (e.g., mRNA) encoding an infection agent antigenic polypeptide fused to a signal peptide (e.g., any one of SEQ ID NO: 15-19). In some embodiments, a multicomponent vaccine comprises a nucleic acid sequence (e.g., mRNA) encoding at least one universal T-cell epitope fused to a signal peptide (e.g., any one of SEQ ID NO: 15-19). The signal peptide may be fused at the N-terminus or the C-terminus of an infection agent antigenic polypeptide and/or universal T-cell epitope.

### Broad Spectrum Vaccines

[0381] There may be situations where subjects are at risk for infection with more than one strain of human Metapneumovirus (hMPV), human parainfluenza viruses (hPIV) types 1, 2, and 3 (hPIV1, hPIV2 and hPIV3, respectively), respiratory syncytial virus (RSV), measles virus (MeV), varicella-zoster, influenza virus, herpes simplex virus 1 (HSV1), herpes simplex virus 2 (HSV2), poxvirus (e.g., smallpox, monkeypox), cytomegalovirus, Epstein-Barr virus, rotavirus. rhinovirus, adenovirus, papillomavirus, poliovirus, mumps, rabies, rubella, coxsackieviruses, equine encephalitis, Japanese encephalitis, yellow fever, Rift Valley fever, hepatitis A, B, C, D, and E virus, coronaviruses (e.g., MERS-COV, SARS-COV, SARS-COV2, HCoV-OC43, HCOV-229E, HCoV-NL63, HCOV-NL, HCOV-NH, HCoV-HKU1), African swine fever (ASF), foot-and-mouth disease virus (FMDV), feline herpesvirus-1/feline viral rhinotracheitis, canine distemper, feline coronavirus (FCOV) or any combination thereof.

[0382] Vaccines are particularly amenable to combination vaccination approaches due to a number of factors including, but not limited to, speed of manufacture, ability to rapidly tailor vaccines to accommodate perceived geographical threat, and the like. Moreover, because the vaccines utilize the human body to produce the infection agent antigenic polypeptide, the vaccines are amenable to the production of larger, more complex antigenic proteins, allowing for proper folding, surface expression, antigen presentation, etc. in the human subject. To protect against more than one strain a combination vaccine can be administered that includes a nucleic acid sequence (e.g., mRNA) encoding an infection agent antigenic polypeptide (or antigenic portion thereof), a nucleic acid encoding at least one second infection agent antigenic polypeptide (or antigenic portion thereof), and a nucleic acid encoding at least one universal T-cell epitope. Nucleic acid sequence (e.g., mRNA) can be co-formulated, for example, in a single lipid nanoparticle (LNP) or can be formulated in separate LNPs for co-administration.

### Combination Vaccines

[0383] Embodiments of the present disclosure also provide combination vaccines. A “combination vaccine” of the present disclosure refers to a vaccine comprising at least one (e.g., at least 2, 3, 4, or 5) nucleic acid sequence (e.g., mRNA) having an open reading frame encoding a combination of any two or more (or all of) infection agent antigenic polypeptides selected from human Metapneumovirus (hMPV), human parainfluenza viruses (hPIV) types 1, 2, and 3 (hPIV1, hPIV2 and hPIV3, respectively), respiratory syncytial virus (RSV), measles virus (MeV), varicella-zoster, influenza virus, herpes simplex virus 1 (HSV1), herpes simplex virus 2 (HSV2), poxvirus (e.g., smallpox, monkeypox), cytomegalovirus, Epstein-Barr virus, rotavirus, rhinovirus, adenovirus, papillomavirus, poliovirus, mumps, rabies, rubella, coxsackieviruses, equine encephalitis, Japanese encephalitis, yellow fever, Rift Valley fever, hepatitis A, B, C, D, and E virus, coronaviruses (e.g., MERS-COV, SARS-COV, SARS-COV2, HCoV-OC43, HCoV-229E, HCoV-NL63, HCOV-NL, HCOV-NH, HCOV-HKU1), African swine fever (ASF), foot-and-mouth disease virus (FMDV), feline herpesvirus-1/feline viral rhinotracheitis, canine distemper, feline coronavirus (FCoV), or any combination thereof, and a nucleic acid sequence (e.g., mRNA) having an open reading frame encoding at least one universal T-cell epitope.

[0384] In some embodiments, a combination vaccine comprises a nucleic acid sequence (e.g., mRNA) encoding a hMPV antigenic polypeptide, a PIV3 antigenic polypeptide, a RSV antigenic polypeptide, a MeV antigenic polypeptide, monkeypox antigenic polypeptide, herpes simplex virus 1 (HSV1) antigenic polypeptide, herpes simplex virus 2 (HSV2) antigenic polypeptide, a coronavirus antigenic polypeptide (e.g., selected from MERS-COV, SARS-CoV-2, HCoV-OC43, HCOV-229E, HCoV-NL63, HCOV-NL, HCOV-NH and HCoV-HKU1), and at least one universal T-cell epitope. In some embodiments, a combination vaccine comprises a nucleic acid sequence (e.g., mRNA) encoding monkeypox antigenic polypeptide, herpes simplex virus 1 (HSV1) antigenic polypeptide, herpes simplex virus 2 (HSV2) antigenic polypeptide, SARS-COV-2 antigenic polypeptide, or any combination thereof, and at least one universal T-cell epitope.

[0385] In some embodiments, a combination vaccine comprises a nucleic acid sequence (e.g., mRNA) encoding a hMPV antigenic polypeptide. a PIV3 antigenic polypeptide, a RSV antigenic polypeptide, a MeV antigenic polypeptide, monkeypox antigenic polypeptide, herpes simplex virus 1 (HSV1) antigenic polypeptide, herpes simplex virus 2 (HSV2) antigenic polypeptide, a coronavirus antigenic polypeptide (e.g., selected from MERS-COV, SARS-CoV-2, HCoV-OC43, HCoV-229E, HCoV-NL63, HCoV-NL, HCOV-NH and HCoV-HKU1), and a nucleic acid sequence (e.g., mRNA) encoding at least one universal T-cell epitope. In some embodiments, a combination vaccine comprises a nucleic acid sequence (e.g., mRNA) encoding monkeypox antigenic polypeptide, herpes simplex virus 1 (HSV1) antigenic polypeptide, herpes simplex virus 2 (HSV2) antigenic polypeptide, SARS-COV-2 antigenic polypeptide, or any combination thereof, and a nucleic acid sequence encoding at least one universal T-cell epitope.

[0386] In some embodiments, a combination vaccine comprising at least one (e.g., at least 2, 3, 4, or 5) nucleic acid sequence (e.g., mRNA) having an open reading frame encoding a combination of any two or more (or all of) infection agent antigenic polypeptides selected from human Metapneumovirus (hMPV), human parainfluenza viruses (hPIV) types 1, 2, and 3 (hPIV1, hPIV2 and hPIV3, respectively), respiratory syncytial virus (RSV), measles virus (MeV), varicella-zoster, influenza virus, herpes simplex virus 1 (HSV1), herpes simplex virus 2 (HSV2), poxvirus (e.g., smallpox, monkeypox), cytomegalovirus, Epstein-Barr virus, rotavirus, rhinovirus, adenovirus, papillomavirus, poliovirus, mumps, rabies, rubella, coxsackieviruses, equine encephalitis, Japanese encephalitis, yellow fever, Rift Valley fever, hepatitis A, B, C, D, and E virus, coronaviruses (e.g., MERS-COV, SARS-COV2, SARS-COV2, HCoV-OC43, HCoV-229E, HCoV-NL63, HCOV-NL, HCOV-NH, HCOV-HKU1), African swine fever (ASF), foot-and-mouth disease virus (FMDV), feline herpesvirus-1/feline viral rhinotracheitis, canine distemper, feline coronavirus (FCoV), or any combination thereof.

[0387] In some embodiments, a combination vaccine comprising at least one (e.g., at least 2, 3, 4, or 5) nucleic acid sequence (e.g., mRNA) having an open reading frame encoding a combination of any two or more (or all of) infection agent antigenic polypeptides selected from human Metapneumovirus (hMPV), human parainfluenza viruses (hPIV) types 1, 2, and 3 (hPIV1, hPIV2 and hPIV3, respectively), respiratory syncytial virus (RSV), measles virus (MeV), varicella-zoster, influenza virus, herpes simplex virus 1 (HSV1), herpes simplex virus 2 (HSV2), poxvirus (e.g., smallpox, monkeypox), cytomegalovirus, Epstein-Barr virus, rotavirus, rhinovirus, adenovirus, papillomavirus, poliovirus, mumps, rabies, rubella, coxsackieviruses, equine encephalitis, Japanese encephalitis, yellow fever, Rift Valley fever, hepatitis A, B, C, D, and E virus, coronaviruses (e.g., MERS-COV, SARS-COV2, SARS-COV2, HCoV-OC43, HCOV-229E, HCoV-NL63, HCOV-NL, HCOV-NH, HCOV-HKU1), African swine fever (ASF), foot-and-mouth disease virus (FMDV), feline herpesvirus-1/feline viral rhinotracheitis, canine distemper, or any combination thereof.

[0388] In some embodiments, a combination vaccine comprising at least one (e.g., at least 2, 3, 4, or 5) nucleic acid sequence (e.g., mRNA) having an open reading frame encoding a combination of any two or more (or all of) infection agent antigenic polypeptides selected from human Metapneumovirus (hMPV), human parainfluenza viruses (hPIV) types 1, 2, and 3 (hPIV1, hPIV2 and hPIV3, respectively), respiratory syncytial virus (RSV), measles virus (MeV). varicella-zoster, influenza virus, herpes simplex virus 1 (HSV1), herpes simplex virus 2 (HSV2), poxvirus (e.g., smallpox, monkeypox), cytomegalovirus, Epstein-Barr virus, rotavirus, rhinovirus, adenovirus, papillomavirus, poliovirus, mumps, rabies, rubella, coxsackieviruses, equine encephalitis, Japanese encephalitis, yellow fever, Rift Valley fever, hepatitis A, B, C, D, and E virus. African swine fever (ASF), foot-and-mouth disease virus (FMDV), feline herpesvirus-1/feline viral rhinotracheitis, canine distemper, feline coronavirus (FCoV), or any combination thereof.

[0389] In some embodiments, a combination vaccine comprising at least one (e.g., at least 2, 3, 4, or 5) nucleic acid sequence (e.g., mRNA) having an open reading frame encoding a combination of any two or more (or all of) infection agent antigenic polypeptides selected from human Metapneumovirus (hMPV), human parainfluenza viruses (hPIV) types 1, 2, and 3 (hPIV1, hPIV2 and hPIV3, respectively), respiratory syncytial virus (RSV), measles virus (MeV), varicella-zoster, influenza virus, poxvirus (e.g., smallpox, monkeypox), cytomegalovirus, Epstein-Barr virus, rotavirus, rhinovirus, adenovirus, papillomavirus, poliovirus, mumps, rabies, rubella, coxsackieviruses, equine encephalitis, Japanese encephalitis, yellow fever, Rift Valley fever, hepatitis A, B, C, D, and E virus, coronaviruses (e.g., MERS-COV, SARS-COV2, SARS-COV2, HCoV-OC43, HCOV-229E, HCoV-NL63, HCoV-NL, HCOV-NH, HCOV-HKU1), African swine fever (ASF), foot-and-mouth disease virus (FMDV), feline herpesvirus-1/feline viral rhinotracheitis, canine distemper, feline coronavirus (FCoV), or any combination thereof.

[0390] In some embodiments, a combination vaccine comprising at least one (e.g., at least 2, 3, 4, or 5) nucleic acid sequence (e.g., mRNA) having an open reading frame encoding a combination of any two or more (or all of) infection agent antigenic polypeptides selected from human Metapneumovirus (hMPV), human parainfluenza viruses (hPIV) types 1, 2, and 3 (hPIV1, hPIV2 and hPIV3, respectively), respiratory syncytial virus (RSV), measles virus (MeV), varicella-zoster, influenza virus, herpes simplex virus 1 (HSV1), herpes simplex virus 2 (HSV2), poxvirus (e.g., smallpox, monkeypox), cytomegalovirus, Epstein-Barr virus, rotavirus, rhinovirus, adenovirus, papillomavirus, poliovirus, mumps, rabies, rubella, coxsackieviruses, equine encephalitis, Japanese encephalitis, yellow fever. Rift Valley fever, hepatitis A, B, C, D, and E virus, African swine fever (ASF), foot-and-mouth disease virus (FMDV), feline herpesvirus-1/feline viral rhinotracheitis, canine distemper, or any combination thereof.

[0391] In some embodiments, a combination vaccine comprising at least one (e.g., at least 2, 3, 4, or 5) nucleic acid sequence (e.g., mRNA) having an open reading frame encoding a combination of any two or more (or all of) infection agent antigenic polypeptides selected from human Metapneumovirus (hMPV), human parainfluenza viruses (hPIV) types 1, 2, and 3 (hPIV1, hPIV2 and hPIV3, respectively), respiratory syncytial virus (RSV), measles virus (MeV), varicella-zoster, influenza virus, poxvirus (e.g., smallpox, monkeypox), cytomegalovirus, Epstein-Barr virus, rotavirus, rhinovirus, adenovirus, papillomavirus, poliovirus, mumps, rabies, rubella, coxsackieviruses, equine encephalitis, Japanese encephalitis, yellow fever, Rift Valley fever, hepatitis A, B, C, D, and E virus, coronaviruses (e.g., MERS-COV, SARS-COV2, SARS-COV2, HCoV-OC43, HCOV-229E, HCoV-NL63, HCoV-NL, HCOV-NH, HCoV-HKU1), African swine fever (ASF), foot-and-mouth disease virus (FMDV), feline herpesvirus-1/feline viral rhinotracheitis, canine distemper, or any combination thereof.

[0392] In some embodiments, a combination vaccine comprising at least one (e.g., at least 2, 3, 4, or 5) nucleic acid sequence (e.g., mRNA) having an open reading frame encoding a combination of any two or more (or all of) infection agent antigenic polypeptides selected from human Metapneumovirus (hMPV), human parainfluenza viruses (hPIV) types 1, 2, and 3 (hPIV1, hPIV2 and hPIV3, respectively), respiratory syncytial virus (RSV), measles virus (MeV), varicella-zoster, influenza virus, poxvirus (e.g., smallpox, monkeypox), cytomegalovirus, Epstein-Barr virus, rotavirus, rhinovirus, adenovirus, papillomavirus, poliovirus, mumps, rabies, rubella, coxsackieviruses, equine encephalitis, Japanese encephalitis, yellow fever. Rift Valley fever, hepatitis A, B, C, D, and E virus, African swine fever (ASF), foot-and-mouth disease virus (FMDV), feline herpesvirus-1/feline viral rhinotracheitis, canine distemper, feline coronavirus (FCoV), or any combination thereof. In some embodiments, a combination vaccine comprises a nucleic acid sequence (e.g., mRNA) encoding a coronavirus (e.g., SARS-COV2) antigenic polypeptide, an Influenza viral antigenic polypeptide, and at least one universal T-cell epitope.

[0393] In some embodiments, a combination vaccine comprises nucleic acid sequence (e.g., mRNA) encoding a coronavirus (e.g., SARS-COV2) antigenic polypeptide, an Influenza viral antigenic polypeptide, and at least one universal T-cell epitope from SARS-COV-2 cross-reactive with other common human coronavirus.

[0394] In some embodiments, a combination vaccine comprises a nucleic acid sequence (e.g., mRNA) encoding a coronavirus (e.g., SARS-COV2) antigenic polypeptide, monkeypox antigenic polypeptide, and a nucleic acid sequence encoding at least one universal T-cell epitope.

[0395] In some embodiments, a combination vaccine comprises a nucleic acid sequence (e.g., mRNA) encoding a coronavirus (e.g., SARS-COV2) antigenic polypeptide, a monkeypox antigenic polypeptide, and a nucleic acid sequence encoding at least one universal T-cell epitope.

[0396] In some embodiments, a combination vaccine comprises a nucleic acid sequence (e.g., mRNA) encoding a coronavirus (e.g., SARS-COV2) antigenic polypeptide, monkeypox antigenic polypeptide, and a nucleic acid sequence encoding at least one universal T-cell epitope.

[0397] In some embodiments, a combination vaccine comprises a nucleic acid sequence (e.g., mRNA) encoding a coronavirus (e.g., SARS-COV2) antigenic polypeptide, a monkeypox antigenic polypeptide, and a nucleic acid sequence encoding at least one universal T-cell epitope.

[0398] In some embodiments, a combination vaccine comprises a nucleic acid sequence (e.g., mRNA) encoding a hMPV antigenic polypeptide, a PIV3 antigenic polypeptide, and at least one universal T-cell epitope.

[0399] In some embodiments, a combination vaccine comprises a nucleic acid sequence (e.g., mRNA) encoding a HSV-1 antigenic polypeptide, a HSV-2 antigenic polypeptide, and at least one universal T-cell epitope, substantially cross-reactive to the homologous epitope between HSV-2 and HSV-1.

[0400] In some embodiments, a combination vaccine comprises a nucleic acid sequence (e.g., mRNA) encoding a hMPV antigenic polypeptide, a MeV antigenic polypeptide, and at least one universal T-cell epitope.

[0401] In some embodiments, a combination vaccine comprises a nucleic acid sequence (e.g., mRNA) encoding a hMPV antigenic polypeptide, a coronavirus antigenic polypeptide, and at least one universal T-cell epitope.

[0402] In some embodiments, a combination vaccine comprises a nucleic acid sequence (e.g., mRNA) encoding a PIV3 antigenic polypeptide, a RSV antigenic polypeptide, and at least one universal T-cell epitope.

[0403] In some embodiments, a combination vaccine comprises a nucleic acid sequence (e.g., mRNA) encoding a PIV3 antigenic polypeptide, a MeV antigenic polypeptide, and at least one universal T-cell epitope.

[0404] In some embodiments, a combination vaccine comprises a nucleic acid sequence (e.g., mRNA) encoding a PIV3 antigenic polypeptide, a coronavirus antigenic polypeptide (e.g., selected from MERS-COV, SARS-COV, HCoV-OC43, HCoV-229E, HCoV-NL63, HCoV-NL, HCoV-NH and HCoV-HKU1), and at least one universal T-cell epitope.

[0405] In some embodiments, a combination vaccine comprises a nucleic acid sequence (e.g., mRNA) encoding a RSV antigenic polypeptide, a MeV antigenic polypeptide, and at least one universal T-cell epitope.

[0406] In some embodiments, a combination vaccine comprises a nucleic acid sequence (e.g., mRNA) encoding a RSV antigenic polypeptide, a coronavirus antigenic polypeptide (e.g., selected from MERS-COV, SARS-COV, HCoV-OC43, HCoV-229E, HCoV-NL63, HCoV-NL, HCOV-NH and HCoV-HKU1), and at least one universal T-cell epitope.

[0407] In some embodiments, a combination vaccine comprises a nucleic acid sequence (e.g., mRNA) encoding a MeV antigenic polypeptide, a coronavirus antigenic polypeptide (e.g., selected from MERS-COV, SARS-COV, HCoV-OC43, HCoV-229E, HCoV-NL63, HCoV-NL, HCOV-NH and HCoV-HKU1), and at least one universal T-cell epitope.

[0408] In some embodiments, a combination vaccine comprises a nucleic acid sequence (e.g., mRNA) encoding a hMPV antigenic polypeptide, a PIV3 antigenic polypeptide, a RSV antigenic polypeptide, a MeV antigenic polypeptide, and at least one universal T-cell epitope.

[0409] In some embodiments, a combination vaccine comprises a nucleic acid sequence (e.g., mRNA) encoding a hMPV antigenic polypeptide, a PIV3 antigenic polypeptide, a RSV antigenic polypeptide, a coronavirus antigenic polypeptide (e.g., selected from MERS-COV, SARS-COV, HCoV-OC43, HCOV-229E, HCoV-NL63, HCOV-NL, HCOV-NH and HCoV-HKU1), and at least one universal T-cell epitope.

[0410] In some embodiments, a combination vaccine comprises a nucleic acid sequence (e.g., mRNA) encoding a hMPV antigenic polypeptide, a PIV3 antigenic polypeptide, a MeV antigenic polypeptide, a coronavirus antigenic polypeptide (e.g., selected from MERS-COV, SARS-COV, HCoV-OC43, HCOV-229E, HCoV-NL63, HCOV-NL, HCOV-NH and HCoV-HKU1), and at least one universal T-cell epitope.

[0411] In some embodiments, a combination vaccine comprises a nucleic acid sequence (e.g., mRNA) encoding a hMPV antigenic polypeptide, a RSV antigenic polypeptide, a MeV antigenic polypeptide, a coronavirus antigenic polypeptide (e.g., selected from MERS-COV, SARS-COV, HCoV-OC43, HCOV-229E, HCoV-NL63, HCoV-NL, HCOV-NH and HCoV-HKU1), and at least one universal T-cell epitope.

[0412] In some embodiments, a combination vaccine comprises a nucleic acid sequence (e.g., mRNA) encoding a PIV3 antigenic polypeptide, a RSV antigenic polypeptide, a MeV antigenic polypeptide, a coronavirus antigenic polypeptide (e.g., selected from MERS-COV, SARS-COV, HCoV-OC43, HCoV-229E, HCoV-NL63, HCoV-NL, HCOV-NH and HCoV-HKU1), and at least one universal T-cell epitope.

[0413] In some embodiments, a combination vaccine comprises a nucleic acid sequence (e.g., mRNA) encoding a hMPV antigenic polypeptide, a PIV3 antigenic polypeptide, a RSV antigenic polypeptide, and at least one universal T-cell epitope.

[0414] In some embodiments, a combination vaccine comprises a nucleic acid sequence (e.g., mRNA) encoding a hMPV antigenic polypeptide, a PIV3 antigenic polypeptide, a MeV antigenic polypeptide, and at least one universal T-cell epitope.

[0415] In some embodiments, a combination vaccine comprises a nucleic acid sequence (e.g., mRNA) encoding a hMPV antigenic polypeptide, a PIV3 antigenic polypeptide, a coronavirus antigenic polypeptide (e.g., selected from MERS-COV, SARS-COV, HCoV-OC43, HCOV-229E, HCoV-NL63, HCOV-NL, HCoV-NH and HCoV-HKU1), and at least one universal T-cell epitope.

[0416] In some embodiments, a combination vaccine comprises a nucleic acid sequence (e.g., mRNA) encoding a hMPV antigenic polypeptide, a RSV antigenic polypeptide, a MeV antigenic polypeptide, and at least one universal T-cell epitope.

[0417] In some embodiments, a combination vaccine comprises a nucleic acid sequence (e.g., mRNA) encoding a hMPV antigenic polypeptide, a RSV antigenic polypeptide, a coronavirus antigenic polypeptide (e.g., selected from MERS-COV, SARS-COV, HCoV-OC43, HCOV-229E, HCoV-NL63, HCoV-NL, HCOV-NH and HCoV-HKU1), and at least one universal T-cell epitope.

[0418] In some embodiments, a combination vaccine comprises a nucleic acid sequence (e.g., mRNA) encoding a hMPV antigenic polypeptide, a MeV antigenic polypeptide, a coronavirus antigenic polypeptide (e.g., selected from MERS-COV, SARS-COV, HCoV-OC43, HCoV-229E, HCoV-NL63, HCOV-NL, HCOV-NH and HCoV-HKU1), and at least one universal T-cell epitope.

[0419] In some embodiments, a combination vaccine comprises a nucleic acid sequence (e.g., mRNA) encoding a PIV3 antigenic polypeptide, a RSV antigenic polypeptide, a MeV antigenic polypeptide, and at least one universal T-cell epitope.

[0420] In some embodiments, a combination vaccine comprises a nucleic acid sequence (e.g., mRNA) encoding a PIV3 antigenic polypeptide, a RSV antigenic polypeptide, a coronavirus antigenic polypeptide (e.g., selected from MERS-COV, SARS-COV, HCoV-OC43, HCOV-229E, HCoV-NL63, HCOV-NL, HCOV-NH and HCoV-HKU1), and at least one universal T-cell epitope.

[0421] In some embodiments, a combination vaccine comprises a nucleic acid sequence (e.g., mRNA) encoding a RSV antigenic polypeptide, a MeV antigenic polypeptide, a coronavirus antigenic polypeptide (e.g., selected from MERS-COV, SARS-COV, HCoV-OC43, HCoV-229E, HCoV-NL63, HCoV-NL, HCOV-NH and HCoV-HKU1), and at least one universal T-cell epitope.

[0422] In some embodiments, a combination vaccine comprises a nucleic acid sequence (e.g., mRNA) encoding a hMPV antigenic polypeptide, a PIV3 antigenic polypeptide, a RSV antigenic polypeptide, a MeV antigenic polypeptide, a coronavirus antigenic polypeptide (e.g., selected from MERS-COV. SARS-COV, HCoV-OC43, HCOV-229E, HCoV-NL63, HCOV-NL, HCOV-NH and HCoV-HKU1), and at least one universal T-cell epitope.

[0423] In some embodiments, a combination vaccine comprises a nucleic acid sequence (e.g., mRNA) encoding a hMPV antigenic polypeptide, a PIV3 antigenic polypeptide, a RSV antigenic polypeptide, a MeV antigenic polypeptide, and a coronavirus antigenic polypeptide (e.g., selected from MERS-COV, SARS-COV, HCoV-OC43, HCOV-229E, HCoV-NL63, HCOV-NL, HCOV-NH and HCoV-HKU1), and a nucleic acid sequence (e.g., mRNA) encoding at least one universal T-cell epitope.

[0424] In some embodiments, a combination vaccine comprises a nucleic acid sequence (e.g., mRNA) encoding a hMPV antigenic polypeptide and a PIV3 antigenic polypeptide, and a nucleic acid sequence (e.g., mRNA) encoding at least one universal T-cell epitope.

[0425] In some embodiments, a combination vaccine comprises a nucleic acid sequence (e.g., mRNA) encoding a hMPV antigenic polypeptide and a RSV antigenic polypeptide, and a nucleic acid sequence (e.g., mRNA) encoding at least one universal T-cell epitope.

[0426] In some embodiments, a combination vaccine comprises a nucleic acid sequence (e.g., mRNA) encoding a hMPV antigenic polypeptide and a MeV antigenic polypeptide, and a nucleic acid sequence (e.g., mRNA) encoding at least one universal T-cell epitope.

[0427] In some embodiments, a combination vaccine comprises a nucleic acid sequence (e.g., mRNA) encoding a hMPV antigenic polypeptide and a coronavirus antigenic polypeptide, and a nucleic acid sequence (e.g., mRNA) encoding at least one universal T-cell epitope.

[0428] In some embodiments, a combination vaccine comprises a nucleic acid sequence (e.g., mRNA) encoding a PIV3 antigenic polypeptide and a RSV antigenic polypeptide, and a nucleic acid sequence (e.g., mRNA) encoding at least one universal T-cell epitope.

[0429] In some embodiments, a combination vaccine comprises a nucleic acid sequence (e.g., mRNA) encoding a PIV3 antigenic polypeptide and a MeV antigenic polypeptide, and a nucleic acid sequence (e.g., mRNA) encoding at least one universal T-cell epitope.

[0430] In some embodiments, a combination vaccine comprises a nucleic acid sequence (e.g., mRNA) encoding a PIV3 antigenic polypeptide and a coronavirus antigenic polypeptide (e.g., selected from MERS-COV, SARS-COV, HCoV-OC43, HCoV-229E, HCoV-NL63, HCoV-NL, HCOV-NH and HCoV-HKU1), and at least one universal nucleic acid sequence (e.g., mRNA) encoding at least one universal T-cell epitope.

[0431] In some embodiments, a combination vaccine comprises a nucleic acid sequence (e.g., mRNA) encoding a RSV antigenic polypeptide and a MeV antigenic polypeptide, and a nucleic acid sequence (e.g., mRNA) encoding at least one universal T-cell epitope.

[0432] In some embodiments, a combination vaccine comprises a nucleic acid sequence (e.g., mRNA) encoding a RSV antigenic polypeptide and a coronavirus antigenic polypeptide (e.g., selected from MERS-COV, SARS-COV, HCoV-OC43, HCOV-229E, HCoV-NL63, HCOV-NL, HCOV-NH and HCoV-HKU1), and a nucleic acid sequence (e.g., mRNA) encoding at least one universal T-cell epitope.

[0433] In some embodiments, a combination vaccine comprises a nucleic acid sequence (e.g., mRNA) encoding a MeV antigenic polypeptide and a coronavirus antigenic polypeptide (e.g., selected from MERS-COV, SARS-COV, HCoV-OC43, HCOV-229E, HCoV-NL63, HCOV-NL, HCOV-NH and HCoV-HKU1), and a nucleic acid sequence (e.g., mRNA) encoding at least one universal T-cell epitope.

[0434] In some embodiments, a combination vaccine comprises a nucleic acid sequence (e.g., mRNA) encoding a hMPV antigenic polypeptide, a PIV3 antigenic polypeptide, a RSV antigenic polypeptide and a MeV antigenic polypeptide, and a nucleic acid sequence (e.g., mRNA) encoding at least one universal T-cell epitope.

[0435] In some embodiments, a combination vaccine comprises a nucleic acid sequence (e.g., mRNA) encoding a hMPV antigenic polypeptide, a PIV3 antigenic polypeptide, a RSV antigenic polypeptide and a coronavirus antigenic polypeptide (e.g., selected from MERS-CoV, SARS-COV, HCoV-OC43, HCOV-229E, HCoV-NL63, HCoV-NL, HCOV-NH and HCoV-HKU1), and a nucleic acid sequence (e.g., mRNA) encoding at least one universal T-cell epitope.

[0436] In some embodiments, a combination vaccine comprises a nucleic acid sequence (e.g., mRNA) encoding a hMPV antigenic polypeptide, a PIV3 antigenic polypeptide, a MeV antigenic polypeptide and a coronavirus antigenic polypeptide (e.g., selected from MERS-CoV, SARS-COV, HCoV-OC43, HCOV-229E, HCoV-NL63, HCOV-NL, HCOV-NH and HCoV-HKU1), and a nucleic acid sequence (e.g., mRNA) encoding at least one universal T-cell epitope.

[0437] In some embodiments, a combination vaccine comprises a nucleic acid sequence (e.g., mRNA) encoding a hMPV antigenic polypeptide, a RSV antigenic polypeptide, a MeV antigenic polypeptide and a coronavirus antigenic polypeptide (e.g., selected from MERS-CoV, SARS-COV, HCoV-OC43, HCOV-229E, HCoV-NL63, HCOV-NL, HCOV-NH and HCoV-HKU1), and a nucleic acid sequence (e.g., mRNA) encoding at least one universal T-cell epitope.

[0438] In some embodiments, a combination vaccine comprises a nucleic acid sequence (e.g., mRNA) encoding a PIV3 antigenic polypeptide, a RSV antigenic polypeptide, a MeV antigenic polypeptide and a coronavirus antigenic polypeptide (e.g., selected from MERS-CoV, SARS-COV, HCoV-OC43, HCOV-229E, HCoV-NL63, HCoV-NL, HCOV-NH and HCoV-HKU1), and a nucleic acid sequence (e.g., mRNA) encoding at least one universal T-cell epitope.

[0439] In some embodiments, a combination vaccine comprises a nucleic acid sequence (e.g., mRNA) encoding a hMPV antigenic polypeptide, a PIV3 antigenic polypeptide and a RSV antigenic polypeptide, and a nucleic acid sequence (e.g., mRNA) encoding at least one universal T-cell epitope.

[0440] In some embodiments, a combination vaccine comprises a nucleic acid sequence (e.g., mRNA) encoding a hMPV antigenic polypeptide, a PIV3 antigenic polypeptide and a MeV antigenic polypeptide, and a nucleic acid sequence (e.g., mRNA) encoding at least one universal T-cell epitope.

[0441] In some embodiments, a combination vaccine comprises a nucleic acid sequence (e.g., mRNA) encoding a hMPV antigenic polypeptide, a PIV3 antigenic polypeptide and a coronavirus antigenic polypeptide (e.g., selected from MERS-COV, SARS-COV, HCoV-OC43, HCoV-229E, HCoV-NL63, HCOV-NL, HCOV-NH and HCoV-HKU1), and at least one universal nucleic acid sequence (e.g., mRNA) encoding at least one universal T-cell epitope.

[0442] In some embodiments, a combination vaccine comprises a nucleic acid sequence (e.g., mRNA) encoding a hMPV antigenic polypeptide, a RSV antigenic polypeptide and a

[0443] MeV antigenic polypeptide, and a nucleic acid sequence (e.g., mRNA) encoding at least one universal T-cell epitope.

[0444] In some embodiments, a combination vaccine comprises a nucleic acid sequence (e.g., mRNA) encoding a hMPV antigenic polypeptide, a RSV antigenic polypeptide and a coronavirus antigenic polypeptide (e.g., selected from MERS-COV, SARS-COV, HCoV-OC43, HCOV-229E, HCoV-NL63, HCOV-NL, HCOV-NH and HCoV-HKU1), and a nucleic acid sequence (e.g., mRNA) encoding at least one universal T-cell epitope.

[0445] In some embodiments, a combination vaccine comprises a nucleic acid sequence (e.g., mRNA) encoding a hMPV antigenic polypeptide, a MeV antigenic polypeptide and a coronavirus antigenic polypeptide (e.g., selected from MERS-COV, SARS-COV, HCoV-OC43, HCOV-229E, HCoV-NL63, HCOV-NL, HCOV-NH and HCoV-HKU1), and a nucleic acid sequence (e.g., mRNA) encoding at least one universal T-cell epitope.

[0446] In some embodiments, a combination vaccine comprises a nucleic acid sequence (e.g., mRNA) encoding a PIV3 antigenic polypeptide, a RSV antigenic polypeptide and a MeV antigenic polypeptide, and a nucleic acid sequence (e.g., mRNA) encoding at least one universal T-cell epitope.

[0447] In some embodiments, a combination vaccine comprises a nucleic acid sequence (e.g., mRNA) encoding a PIV3 antigenic polypeptide, a RSV antigenic polypeptide and a coronavirus antigenic polypeptide (e.g., selected from MERS-COV, SARS-COV, HCoV-OC43, HCOV-229E, HCoV-NL63, HCOV-NL, HCOV-NH and HCoV-HKU1), and a nucleic acid sequence (e.g., mRNA) encoding at least one universal T-cell epitope.

[0448] In some embodiments, a combination vaccine comprises a nucleic acid sequence (e.g., mRNA) encoding a RSV antigenic polypeptide, a MeV antigenic polypeptide and a coronavirus antigenic polypeptide (e.g., selected from MERS-COV, SARS-COV, HCoV-OC43, HCOV-229E, HCoV-NL63, HCOV-NL, HCOV-NH and HCoV-HKU1), and a nucleic acid sequence (e.g., mRNA) encoding at least one universal T-cell epitope.

[0449] Other combination vaccines are encompassed by the present disclosure.

### Infection Agents

[0450] In some embodiments, the mRNA can encode an infection agent antigenic polypeptide. In some embodiments, the mRNA can encode a viral antigenic polypeptide. In some embodiments, the virus can be of the family Paramyxoviridae such as human Metapneumovirus (hMPV), parainfluenza viruses (PIV), respiratory syncytial virus (RSV), measles virus (MeV), HIV, varicella-zoster, influenza virus (e.g., influenza A and B), herpes simplex virus 1 (HSV1), herpes simplex virus 2 (HSV2), poxvirus (e.g., smallpox, monkeypox), cytomegalovirus, Epstein-Barr virus, rotavirus, rhinovirus, adenovirus, papillomavirus, poliovirus, mumps, rabies, rubella, coxsackieviruses, equine encephalitis, Japanese encephalitis, yellow fever, Rift Valley fever, hepatitis A, B, C, D, and E virus, coronaviruses, or any combination thereof.

[0451] Representative examples of parainfluenza viruses (PIV) can include, but are not limited to, human parainfluenza viruses (hPIV) types 1, 2, and 3 (hPIV1, hPIV2 and hPIV3, respectively).

[0452] Coronaviruses are enveloped viruses with a positive-sense single-stranded RNA genome and with a nucleocapsid of helical symmetry. Coronaviruses are species of virus belonging to the subfamily Coronavirinae in the family Coronaviridae, in the order Nidovirales.

[0453] Representative examples of betacoronaviruses include, but are not limited to an embecovirus 1 (e.g., Betacoronavirus 1, Human coronavirus OC43, China Rattus coronavirus HKU24, Human coronavirus HKU1, Murine coronavirus), a hibecovirus (e.g., Bat Hp-betacoronavirus Zhejiang2013), a merbecovirus (e.g., Hedgehog coronavirus 1, Middle East respiratory syndrome-related coronavirus (MERS-COV), Pipistrellus bat coronavirus HKU5, Tylonycteris bat coronavirus HKU4), a nobecovirus (e.g., Rousettus bat coronavirus GCCDC1, Rousettus bat coronavirus HKU9), a sarbecovirus (e.g., severe acute respiratory syndrome coronavirus (SARS-COV), severe acute respiratory syndrome coronavirus 2 (SARS-COV-2).

[0454] Representative examples of gammacoronaviruses include, but are not limited to, a cegacovirus (e.g., Beluga whale coronavirus SQ1) and an Igacovirus (e.g., Avian coronavirus (IBV)).

[0455] Representative examples of deltacoronaviruses include, but are not limited to, an andecovirus (e.g., Wigeon coronavirus HKU20), a buldecovirus (e.g., Bulbul coronavirus HKU11, Porcine coronavirus HKU15 (PorCoV HKU15), Munia coronavirus HKU13, White-eye coronavirus HKU16), a herdecovirus (e.g., Night heron coronavirus HKU19), and a moordecovirus (e.g., Common moorhen coronavirus HKU21).

[0456] In some embodiments, the coronavirus is a human coronavirus. Representative examples of human coronaviruses include, but are not limited to, severe acute respiratory syndrome coronavirus (SARS-COV), severe acute respiratory syndrome coronavirus 2 (SARS-CoV-2), and Middle East respiratory syndrome-related coronavirus (MERS-COV), human coronavirus 229E (HCoV-229E), human coronavirus OC43 (HCoV-OC43), human coronavirus HKU1 (HCoV-HKU1), Human coronavirus NL63 (HCoV-NL63).

[0457] In some embodiments, the mRNA can have an open reading frame encoding at least one (e.g., at least 2, 3, 4 or 5) human Metapneumovirus (hMPV) antigenic polypeptide, human parainfluenza viruses (hPIV) types 1, 2, and 3 (hPIV1, hPIV2 and hPIV3, respectively) antigenic polypeptide, respiratory syncytial virus (RSV) antigenic polypeptide, measles virus (MeV) antigenic polypeptide, varicella-zoster antigenic polypeptide, influenza virus antigenic polypeptide, herpes simplex virus 1 (HSV1) antigenic polypeptide, herpes simplex virus 2 (HSV2) antigenic polypeptide, poxvirus (e.g., smallpox, monkeypox) antigenic polypeptide, cytomegalovirus antigenic polypeptide. Epstein-Barr virus antigenic polypeptide, rotavirus antigenic polypeptide, rhinovirus antigenic polypeptide, adenovirus antigenic polypeptide, papillomavirus antigenic polypeptide, poliovirus antigenic polypeptide, mumps antigenic polypeptide, rabies antigenic polypeptide, rubella antigenic polypeptide, coxsackieviruses antigenic polypeptide, equine encephalitis antigenic polypeptide, Japanese encephalitis antigenic polypeptide, yellow fever antigenic polypeptide, Rift Valley fever antigenic polypeptide, hepatitis A, B, C, D, and E virus antigenic polypeptide, or coronaviruses (e.g., MERS-COV, SARS-COV, SARS-COV2, HCoV-OC43, HCOV-229E, HCoV-NL63, HCoV-NL, HCOV-NH, HCoV-HKU1) antigenic polypeptide, or any combination of two or more of the antigenic polypeptides.

### Universal T-Cell Epitope (UTE)

[0458] In some embodiments, the nucleic acid sequence (e.g., an mRNA) can encode at least one universal T-cell epitope. In some embodiments, the nucleic acid sequence can encode a recombinant or heterologous antigen containing at least one universal T-cell epitope, which will be processed and presented on the surface of the cell in the context of a major histocompatibility complex (MHC) molecule. Suitable T-cell epitope can include, but are not limited to, MHC class I (MHC I) and MHC class II restricted (MHC II) T cell epitopes. The universal T-cell epitopes amino acid sequence can be of from 8 amino acid (aa) to 15 aa for MHC I restrict CD8 T cell and 10 aa to 28 aa for MHC II restricted CD4 T cell epitopes. The universal T-cell epitopes can be any sequences that have been identified, or based on epitope prediction through computational tools.

[0459] In one embodiment, the composition can include at least one universal T-cell epitope. In some embodiments, the T-cell epitope can bind to specific HLA-A1, HLA-A2, HLA-B7, HLA-B40, HLA-Cw7 alleles, or any combination thereof.

### MHC 1 and MHC II

[0460] There are two subtypes of MHC molecules, MHC Class I and II molecules (MHC I and MHC II). These subtypes correspond to two subsets of T-lymphocytes: 1) CD8+ cytotoxic T-cells, which usually recognize peptides presented by MHC I, and kill infected cells or cells harboring a mutation(s), and 2) CD4+ helper T-cells, which usually recognize peptides presented by MHC Class II molecules, and regulate the responses of other cells of the immune system. A “MHC Class I molecule” as used everywhere herein is defined as a molecule which comprises 1-3 subunits, including a heavy chain, a heavy chain combined with a light chain (B2m). A “MHC Class II molecule” as used everywhere herein is defined as a molecule which comprises 2-3 subunits including an a-chain and a P-chain (oc/β-dimer).

[0461] MHC Class I like molecules (including non-classical MHC Class I molecules) can include, but are not limited to, CDId, HLA E, HLA G, HLA F, HLA H, MIC A, MIC B, ULBP-1, ULBP-2, and ULBP-3. MHC Class II like molecules (including non-classical MHC Class II molecules) can include, but are not limited to, HLA DM, HLA D0, I-A beta2, and I-E beta2.

[0462] The MHC molecule can suitably be a vertebrate MHC molecule such as a human, a mouse, a rat, a canine, a porcine, a feline, a bovine or an avian MHC molecule. Such MHC molecules from different species have different names. For example, in humans, the term “MHC” is used interchangeably with HLA herein.

[0463] In general, the term “MHC molecule” is intended to include alleles. By way of example, in humans e. g. HLA A, HLA B, HLA C, HLA D, HLA E, HLA F, HLA G, HLA H, HLA DR, HLA DQ and HLA DP alleles are of interest, and in the mouse system, H-2 alleles are of interest. Likewise, in the rat system RT1-alleles, in the porcine system SLA-alleles, in the bovine system BoLA, in the avian system e. g. chicken-B alleles, are of interest.

### Infection Agent Antigenic Polypeptides

[0464] Herein, use of the term “antigen” encompasses immunogenic fragments of the antigen (an immunogenic fragment that induces (or is capable of inducing) an immune response to hMPV, PIV, RSV, MeV, influenza virus, HSV1, HSV2, poxvirus, or coronaviruses (e.g., SARS-COV2), unless otherwise stated.

Human Metapneumovirus (hMPV)

[0465] hMPV shares substantial homology with respiratory syncytial virus (RSV) in its surface glycoproteins. hMPV fusion protein (F) is related to other paramyxovirus fusion proteins and appears to have homologous regions that may have similar functions. The hMPV fusion protein amino acid sequence contains features characteristic of other paramyxovirus F proteins, including a putative cleavage site and potential N-linked glycosylation sites. Paramyxovirus fusion proteins are synthesized as inactive precursors (FO) that are cleaved by host cell proteases into the biologically fusion-active F1 and F2 domains (see, e.g., Cseke G. et al. Journal of Virology 2007; 81 (2):698-707, incorporated herein by reference). hMPV has one putative cleavage site, in contrast to the two sites established for RSV F, and only shares 34% amino acid sequence identity with RSV F. F2 is extracellular and disulfide linked to F1. Fusion proteins are type I glycoproteins existing as trimers, with two 4-3 heptad repeat domains at the N- and C-terminal regions of the protein (HR 1 and HR2), which form coiled-coil alpha-helices. These coiled coils become apposed in an antiparallel fashion when the protein undergoes a conformational change into the fusogenic state. There is a hydrophobic fusion peptide N proximal to the N-terminal heptad repeat, which is thought to insert into the target cell membrane, while the association of the heptad repeats brings the transmembrane domain into close proximity, inducing membrane fusion (see, e.g., Baker, K A et al. Mol. Cell 1999; 3:309-319). This mechanism has been proposed for a number of different viruses, including RSV, influenza virus, and human immunodeficiency virus. Fusion proteins are major antigenic determinants for all known paramyxoviruses and for other viruses that possess similar fusion proteins such as human immunodeficiency virus, influenza virus, and Ebola virus.

[0466] In some embodiments, a hMPV vaccine of the present disclosure comprises a nucleic acid sequence (e.g., mRNA) encoding hMPV fusion protein (F), and a nucleic acid sequence (e.g., mRNA) encoding at least one universal T-cell epitope. In some embodiments, a hMPV vaccine of the present disclosure comprises a nucleic acid sequence (e.g., mRNA) encoding a F1 or F2 subunit of a hMPV F protein, and a nucleic acid sequence (e.g., mRNA) encoding at least one universal T-cell epitope. In some embodiments, a hMPV vaccine of the present disclosure comprises a nucleic acid sequence (e.g., mRNA) encoding hMPV glycoprotein (G), and a nucleic acid sequence (e.g., mRNA) encoding at least one universal T-cell epitope. In some embodiments, a hMPV vaccine of the present disclosure comprises a nucleic acid sequence (e.g., mRNA) encoding hMPV matrix protein (M), and a nucleic acid sequence (e.g., mRNA) encoding at least one universal T-cell epitope. In some embodiments, a hMPV vaccine of the present disclosure comprises a nucleic acid sequence (e.g., mRNA) encoding hMPV phosphoprotein (P), and a nucleic acid sequence (e.g., mRNA) encoding at least one universal T-cell epitope. In some embodiments, a hMPV vaccine of the present disclosure comprises a nucleic acid sequence (e.g., mRNA) encoding hMPV nucleoprotein (N), and a nucleic acid sequence (e.g., mRNA) encoding at least one universal T-cell epitope. In some embodiments, a hMPV vaccine of the present disclosure comprises a nucleic acid sequence (e.g., mRNA) encoding hMPV SH protein (SH), and a nucleic acid sequence (e.g., mRNA) (e.g., mRNA) polynucleotide encoding at least one universal T-cell epitope.

[0467] In some embodiments, a hMPV vaccine of the present disclosure comprises a nucleic acid sequence (e.g., mRNA) encoding hMPV fusion protein (F), and at least one T-cell epitope. In some embodiments, a hMPV vaccine of the present disclosure comprises a nucleic acid sequence (e.g., mRNA) encoding a Fl or F2 subunit of a hMPV F protein, and at least one T-cell epitope. In some embodiments, a hMPV vaccine of the present disclosure comprises a nucleic acid sequence (e.g., mRNA) encoding hMPV glycoprotein (G), and at least one universal T-cell epitope. In some embodiments, a hMPV vaccine of the present disclosure comprises a nucleic acid sequence (e.g., mRNA) encoding hMPV matrix protein (M), and at least one universal T-cell epitope. In some embodiments, a hMPV vaccine of the present disclosure comprises a nucleic acid sequence (e.g., mRNA) encoding hMPV phosphoprotein (P), and at least one universal T-cell epitope. In some embodiments, a hMPV vaccine of the present disclosure comprises a nucleic acid sequence (e.g., mRNA) encoding hMPV nucleoprotein (N), and at least one universal T-cell epitope. In some embodiments, a hMPV vaccine of the present disclosure comprises a nucleic acid sequence (e.g., mRNA) encoding hMPV SH protein (SH), and at least one universal T-cell epitope.

[0468] In some embodiments, a hMPV vaccine of the present disclosure comprises a nucleic acid sequence (e.g., mRNA) encoding F protein, G protein, M protein, P protein, N protein and SH protein, and a nucleic acid sequence (e.g., mRNA) encoding at least one universal T-cell epitope.

[0469] In some embodiments, a hMPV vaccine of the present disclosure comprises a nucleic acid sequence (e.g., mRNA) encoding F protein, G protein, M protein, P protein, N protein, SH protein, and at least one universal T-cell epitope.

[0470] In some embodiments, a hMPV vaccine of the present disclosure comprises a nucleic acid sequence (e.g., mRNA) encoding F protein and G protein, and a nucleic acid sequence (e.g., mRNA) encoding at least one universal T-cell epitope. In some embodiments, a hMPV vaccine of the present disclosure comprises a nucleic acid sequence (e.g., mRNA) encoding F protein and M protein, and a nucleic acid sequence (e.g., mRNA) encoding at least one universal T-cell epitope. In some embodiments, a hMPV vaccine of the present disclosure comprises a nucleic acid sequence (e.g., mRNA) encoding F protein and P protein, and a nucleic acid sequence (e.g., mRNA) encoding at least one universal T-cell epitope. In some embodiments, a hMPV vaccine of the present disclosure comprises a nucleic acid sequence (e.g., mRNA) encoding F protein and N protein, and a nucleic acid sequence (e.g., mRNA) encoding at least one universal T-cell epitope. In some embodiments, a hMPV vaccine of the present disclosure comprises a nucleic acid sequence (e.g., mRNA) encoding F protein and SH protein, and a nucleic acid sequence (e.g., mRNA) encoding at least one universal T-cell epitope.

[0471] In some embodiments, a hMPV vaccine of the present disclosure comprises a nucleic acid sequence (e.g., mRNA) encoding G protein and M protein, and a nucleic acid sequence (e.g., mRNA) encoding at least one universal T-cell epitope. In some embodiments, a hMPV vaccine of the present disclosure comprises a nucleic acid sequence (e.g., mRNA) encoding G protein and P protein, and a nucleic acid sequence (e.g., mRNA) encoding at least one universal T-cell epitope. In some embodiments, a hMPV vaccine of the present disclosure comprises a nucleic acid sequence (e.g., mRNA) encoding G protein and N protein, and a nucleic acid sequence (e.g., mRNA) encoding at least one universal T-cell epitope. In some embodiments, a hMPV vaccine of the present disclosure comprises a nucleic acid sequence (e.g., mRNA) encoding G protein and SH protein, and a nucleic acid sequence (e.g., mRNA) encoding at least one universal T-cell epitope.

[0472] In some embodiments, a hMPV vaccine of the present disclosure comprises a nucleic acid sequence (e.g., mRNA) encoding F protein, G protein and M protein, and a nucleic acid sequence (e.g., mRNA) encoding at least one universal T-cell epitope. In some embodiments, a hMPV vaccine of the present disclosure comprises a nucleic acid sequence (e.g., mRNA) encoding F protein, G protein and P protein, and a nucleic acid sequence (e.g., mRNA) encoding at least one universal T-cell epitope. In some embodiments, a hMPV vaccine of the present disclosure comprises a nucleic acid sequence (e.g., mRNA) encoding F protein, G protein and N protein, and a nucleic acid sequence (e.g., mRNA) encoding at least one universal T-cell epitope. In some embodiments, a hMPV vaccine of the present disclosure comprises a nucleic acid sequence (e.g., mRNA) encoding F protein, G protein and SH protein, and a nucleic acid sequence (e.g., mRNA) encoding at least one universal T-cell epitope.

[0473] A hMPV vaccine may comprise, for example, at least one RNA (e.g., mRNA) polynucleotide having an open reading frame encoding at least one hMPV antigenic polypeptide identified by any one of SEQ ID NO: 5-8, and a nucleic acid sequence (e.g., mRNA) encoding at least one universal T-cell epitope.

[0474] A hMPV vaccine may comprise, for example, at least one RNA (e.g., mRNA) polynucleotide encoded by a nucleic acid (e.g., DNA) identified by any one of SEQ ID NO: 1-4, and a nucleic acid sequence (e.g., mRNA) encoding at least one universal T-cell epitope.

[0475] In some embodiments, a hMPV vaccine of the present disclosure comprises a nucleic acid sequence (e.g., mRNA) encoding F protein, G protein, and at least one universal T-cell epitope. In some embodiments, a hMPV vaccine of the present disclosure comprises a nucleic acid sequence (e.g., mRNA) encoding F protein, M protein, and at least one universal T-cell epitope. In some embodiments, a hMPV vaccine of the present disclosure comprises a nucleic acid sequence (e.g., mRNA) encoding F protein, P protein, and at least one universal T-cell epitope. In some embodiments, a hMPV vaccine of the present disclosure comprises a nucleic acid sequence (e.g., mRNA) encoding F protein, N protein, and at least one universal T-cell epitope. In some embodiments, a hMPV vaccine of the present disclosure comprises a nucleic acid sequence (e.g., mRNA) encoding F protein, SH protein, and at least one universal T-cell epitope.

[0476] In some embodiments, a hMPV vaccine of the present disclosure comprises a nucleic acid sequence (e.g., mRNA) encoding G protein, M protein, and at least one universal T-cell epitope. In some embodiments, a hMPV vaccine of the present disclosure comprises a nucleic acid sequence (e.g., mRNA) encoding G protein, P protein, and at least one universal T-cell epitope. In some embodiments, a hMPV vaccine of the present disclosure comprises a nucleic acid sequence (e.g., mRNA) encoding G protein, N protein, and at least one universal T-cell epitope. In some embodiments, a hMPV vaccine of the present disclosure comprises a nucleic acid sequence (e.g., mRNA) encoding G protein, SH protein, and at least one universal T-cell epitope.

[0477] In some embodiments, a hMPV vaccine of the present disclosure comprises a nucleic acid sequence (e.g., mRNA) encoding F protein, G protein, M protein, and at least one universal T-cell epitope. In some embodiments, a hMPV vaccine of the present disclosure comprises a nucleic acid sequence (e.g., mRNA) encoding F protein, G protein, P protein, and at least one universal T-cell epitope. In some embodiments, a hMPV vaccine of the present disclosure comprises a nucleic acid sequence (e.g., mRNA) encoding F protein, G protein, N protein, and at least one universal T-cell epitope. In some embodiments, a hMPV vaccine of the present disclosure comprises a nucleic acid sequence (e.g., mRNA) encoding F protein, G protein, SH protein, and at least one universal T-cell epitope.

[0478] A hMPV vaccine may comprise, for example, at least one RNA (e.g., mRNA) polynucleotide having an open reading frame encoding at least one hMPV antigenic polypeptide identified by any one of SEQ ID NO: 5-8, and at least one universal T-cell epitope.

[0479] A hMPV vaccine may comprise, for example, at least one RNA (e.g., mRNA) polynucleotide encoded by a nucleic acid (e.g., DNA) identified by any one of SEQ ID NO: 1-4, and at least one universal T-cell epitope.

[0480] The present disclosure is not limited by a particular strain of hMPV. The strain of hMPV used in a vaccine may be any strain of hMPV. Non-limiting examples of strains of hMPV for use as provide herein include the CAN98-75 (CAN75) and the CAN97-83 (CAN83) hMPV strains (Skiadopoulos M H et al. J Virol. 20014; 78 (13) 6927-37, incorporated herein by reference), a hMPV A1, A2, B1 or B2 strain (see, e.g., de Graaf M et al. The Journal of General Virology 2008; 89:975-83; Peret T C T et al. The Journal of Infectious Disease 2002; 185:1660-63. incorporated herein by reference), a hMPV isolate TN/92-4 (e.g., SEQ ID NO: 1 and 5), a hMPV isolate NL/1/99 (e.g., SEQ ID NO: 2 and 6), or a hMPV isolate PER/CFI0497/2010/B (e.g., SEQ ID NO: 3 and 7).

[0481] In some embodiments, at least one hMPV antigenic polypeptide is obtained from a hMPV A1, A2, B1 or B2 strain (see, e.g., de Graaf M et al. The Journal of General Virology 2008; 89:975-83; Peret T C T et al. The Journal of Infectious Disease 2002; 185:1660-63, incorporated herein by reference). In some embodiments, at least one antigenic polypeptide is obtained from the CAN98-75 (CAN75) hMPV strain. In some embodiments, at least one antigenic polypeptide is obtained from the CAN97-83 (CAN83) hMPV strain. In some embodiments, at least one antigenic polypeptide is obtained from hMPV isolate TN/92-4 (e.g., SEQ ID NO: 1 and 5). In some embodiments, at least one antigenic polypeptide is obtained from hMPV isolate NL/1/99 (e.g., SEQ ID NO: 2 and 6). In some embodiments, at least one antigenic polypeptide is obtained from hMPV isolate PER/CFI0497/2010/B (e.g., SEQ ID NO: 3 and 7).

[0482] In some embodiments, hMPV vaccines comprise RNA (e.g., mRNA) polynucleotides encoding a hMPV antigenic polypeptides having at least 95%, at least 96%, at least 97%, at least 98% or at least 99% identity with hMPV F protein and having F protein activity.

[0483] A protein is considered to have F protein activity if, for example, the protein acts to fuse the viral envelope and host cell plasma membrane, mediates viral entry into a host cell via an interaction with arginine-glycine-aspartate RGD-binding integrins, or a combination thereof (see, e.g., Cox R G et al. J Virol. 2012; 88 (22): 12148-60, incorporated herein by reference).

[0484] In some embodiments, hMPV vaccines comprise RNA (e.g., mRNA) polynucleotides encoding hMPV antigenic polypeptides having at least 95%, at least 96%, at least 97%, at least 98% or at least 99% identity with hMPV G protein and having G protein activity.

[0485] A protein is considered to have G protein activity if, for example, the protein acts to modulate (e.g., inhibit) hMPV-induced cellular (immune) responses (see, e.g., Bao X et al. PLOS Pathog. 2008; 4 (5): e1000077, incorporated herein by reference).

### Human Parainfluenza Virus Type 3 (PIV3)

[0486] Parainfluenza viruses belong to the family Paramyxoviridae. These are enveloped viruses with a negative-sense single-stranded RNA genome. Parainfluenza viruses belong to the subfamily Paramyxoviridae, which is subdivided into three genera: Respirovirus (PIV-1, PIV-3, and Sendai virus (SeV)), Rubulavirus (PIV-2, PIV-4 and mumps virus) and Morbillivirus (measles virus, rinderpest virus and canine distemper virus (CDV)). Their genome, a ˜15 500 nucleotide-long negative-sense RNA molecule, encodes two envelope glycoproteins, the hemagglutinin-neuraminidase (HN), the fusion protein (F or FO), which is cleaved into F1 and F2 subunits, a matrix protein (M), a nucleocapsid protein (N) and several nonstructural proteins including the viral replicase (L). All parainfluenza viruses, except for PIV-1, express a non-structural V protein that blocks IFN signaling in the infected cell and acts therefore as a virulence factor (see, e.g., Nishio M et al. J Virol. 2008; 82 (13): 6130-38).

[0487] PIV3 hemagglutinin-neuraminidase (HN), a structural protein, is found on the viral envelope, where it is necessary for attachment and cell entry. It recognizes and binds to sialic acid-containing receptors on the host cell's surface. As a neuroaminidase, HN removes sialic acid from virus particles, preventing self-aggregation of the virus, and promoting the efficient spread of the virus. Furthermore, HN promotes the activity of the fusion (F or FO) protein, contributing to the penetration of the host cell's surface.

[0488] PIV3 fusion protein (PIV3 F) is located on the viral envelope, where it facilitates the viral fusion and cell entry. The F protein is initially inactive, but proteolytic cleavage leads to its active forms, F1 and F2, which are linked by disulfide bonds. This occurs when the HN protein binds its receptor on the host cell's surface. During early phases of infection, the F glycoprotein mediates penetration of the host cell by fusion of the viral envelope to the plasma membrane. In later stages of the infection, the F protein facilitates the fusion of the infected cells with neighboring uninfected cells, which leads to the formation of a syncytium and spread of the infection.

[0489] PIV3 matrix protein (M) is found within the viral envelope and assists with viral assembly. It interacts with the nucleocapsid and envelope glycoproteins, where it facilitates the budding of progeny viruses through its interactions with specific sites on the cytoplasmic tail of the viral glycoproteins and nucleocapsid. It also plays a role in transporting viral components to the budding site.

[0490] PIV3 phosphoprotein (P) and PIV3 large polymerase protein (L) are found in the nucleocapsid where they form part of the RNA polymerase complex. The L protein, a viral RNA-dependent RNA polymerase, facilitates genomic transcription, while the host cell's ribosomes translate the viral mRNA into viral proteins.

[0491] PIV3 V is a non-structural protein that blocks IFN signaling in the infected cell, therefore acting as a virulence factor.

[0492] PIV3 nucleoprotein (N) encapsidates the genome in a ratio of 1 N per 6 ribonucleotides, protecting it from nucleases. The nucleocapsid (NC) has a helical structure. The encapsidated genomic RNA is termed the NC and serves as template for transcription and replication. During replication, encapsidation by PIV3 N is coupled to RNA synthesis and all replicative products are resistant to nucleases. PIV3 N homo-multimerizes to form the nucleocapsid and binds to viral genomic RNA. PIV3 N binds the P protein and thereby positions the polymerase on the template.

[0493] In some embodiments, a PIV3 vaccine of the present disclosure comprises a nucleic acid sequence (e.g., mRNA) encoding PIV3 fusion protein (F), and a nucleic acid sequence (e.g., mRNA) encoding at least one universal T-cell epitope. In some embodiments, a PIV3 vaccine of the present disclosure comprises a nucleic acid sequence (e.g., mRNA) encoding a Fl or F2 subunit of a PIV3 F protein, and a nucleic acid sequence (e.g., mRNA) encoding at least one universal T-cell epitope. In some embodiments, a PIV3 vaccine of the present disclosure comprises a nucleic acid sequence (e.g., mRNA) encoding PIV3 hemagglutinin-neuraminidase (HN) (see, e.g., van Wyke Coelingh K L et al. J Virol. 1987; 61 (5): 1473-77, incorporated herein by reference), and a nucleic acid sequence (e.g., mRNA) encoding at least one universal T-cell epitope. In some embodiments, a PIV3 vaccine of the present disclosure comprises a nucleic acid sequence (e.g., mRNA) encoding PIV3 matrix protein (M), and a nucleic acid sequence (e.g., mRNA) encoding at least one universal T-cell epitope. In some embodiments, a PIV3 vaccine of the present disclosure comprises a nucleic acid sequence (e.g., mRNA) encoding PIV3 phosphoprotein (P), and a nucleic acid sequence (e.g., mRNA) encoding at least one universal T-cell epitope. In some embodiments, a PIV3 vaccine of the present disclosure comprises a nucleic acid sequence (e.g., mRNA) encoding PIV3 nucleoprotein (N), and a nucleic acid sequence (e.g., mRNA) encoding at least one universal T-cell epitope.

[0494] In some embodiments, a PIV3 vaccine of the present disclosure comprises a nucleic acid sequence (e.g., mRNA) encoding F protein, HN protein, M protein, P protein, and N protein, and a nucleic acid sequence (e.g., mRNA) encoding at least one universal T-cell epitope.

[0495] In some embodiments, a PIV3 vaccine of the present disclosure comprises a nucleic acid sequence (e.g., mRNA) encoding F protein and HN protein, and a nucleic acid sequence (e.g., mRNA) encoding at least one universal T-cell epitope. In some embodiments, a PIV3 vaccine of the present disclosure comprises a nucleic acid sequence (e.g., mRNA) encoding F protein and M protein, and a nucleic acid sequence (e.g., mRNA) encoding at least one universal T-cell epitope. In some embodiments, a PIV3 vaccine of the present disclosure comprises a nucleic acid sequence (e.g., mRNA) encoding F protein and P protein, and a nucleic acid sequence (e.g., mRNA) encoding at least one universal T-cell epitope. In some embodiments, a PIV3 vaccine of the present disclosure comprises a nucleic acid sequence (e.g., mRNA) encoding F protein and N protein, and a nucleic acid sequence (e.g., mRNA) encoding at least one universal T-cell epitope.

[0496] In some embodiments, a PIV3 vaccine of the present disclosure comprises a nucleic acid sequence (e.g., mRNA) encoding HN protein and M protein, and a nucleic acid sequence (e.g., mRNA) encoding at least one universal T-cell epitope. In some embodiments, a PIV3 vaccine of the present disclosure comprises a nucleic acid sequence (e.g., mRNA) encoding HN protein and P protein, and a nucleic acid sequence (e.g., mRNA) encoding at least one universal T-cell epitope. In some embodiments, a PIV3 vaccine of the present disclosure comprises a nucleic acid sequence (e.g., mRNA) encoding HN protein and N protein, and a nucleic acid sequence (e.g., mRNA) encoding at least one universal T-cell epitope.

[0497] In some embodiments, a PIV3 vaccine of the present disclosure comprises a nucleic acid sequence (e.g., mRNA) encoding F protein, HN protein and M protein, and a nucleic acid sequence (e.g., mRNA) encoding at least one universal T-cell epitope. In some embodiments, a PIV3 vaccine of the present disclosure comprises a nucleic acid sequence (e.g., mRNA) encoding F protein, HN protein and P protein, and a nucleic acid sequence (e.g., mRNA) encoding at least one universal T-cell epitope. In some embodiments, a PIV3 vaccine of the present disclosure comprises a nucleic acid sequence (e.g., mRNA) encoding F protein, HN protein and N protein, and a nucleic acid sequence (e.g., mRNA) encoding at least one universal T-cell epitope.

[0498] A PIV3 vaccine may comprise, for example, at least one RNA (e.g., mRNA) polynucleotide having an open reading frame encoding at least one PIV3 antigenic polypeptide identified by any one of SEQ ID NO: 12-13, and a nucleic acid sequence (e.g., mRNA) encoding at least one universal T-cell epitope.

[0499] A PIV3 vaccine may comprise, for example, at least one RNA (e.g., mRNA) polynucleotide encoded by a nucleic acid (e.g., DNA) identified by any one of SEQ ID NO: 9-12, and a nucleic acid sequence (e.g., mRNA) encoding at least one universal T-cell epitope.

[0500] In some embodiments, a PIV3 vaccine of the present disclosure comprises a nucleic acid sequence (e.g., mRNA) encoding PIV3 fusion protein (F), and at least one universal T-cell epitope. In some embodiments, a PIV3 vaccine of the present disclosure comprises a nucleic acid sequence (e.g., mRNA) encoding a F1 or F2 subunit of a PIV3 F protein, and at least one universal T-cell epitope. In some embodiments, a PIV3 vaccine of the present disclosure comprises a nucleic acid sequence (e.g., mRNA) encoding PIV3 hemagglutinin-neuraminidase (HN) (see, e.g., van Wyke Coelingh K L et al. J Virol. 1987; 61 (5): 1473-77, incorporated herein by reference), and at least one universal T-cell epitope. In some embodiments, a PIV3 vaccine of the present disclosure comprises a nucleic acid sequence (e.g., mRNA) encoding PIV3 matrix protein (M), and at least one universal T-cell epitope. In some embodiments, a PIV3 vaccine of the present disclosure comprises a nucleic acid sequence (e.g., mRNA) encoding PIV3 phosphoprotein (P), and at least one universal T-cell epitope. In some embodiments, a PIV3 vaccine of the present disclosure comprises a nucleic acid sequence (e.g., mRNA) encoding PIV3 nucleoprotein (N), and at least one universal T-cell epitope.

[0501] In some embodiments, a PIV3 vaccine of the present disclosure comprises a nucleic acid sequence (e.g., mRNA) encoding F protein, HN protein, M protein, P protein, N protein, and at least one universal T-cell epitope.

[0502] In some embodiments, a PIV3 vaccine of the present disclosure comprises a nucleic acid sequence (e.g., mRNA) encoding F protein, HN protein, and at least one universal T-cell epitope. In some embodiments, a PIV3 vaccine of the present disclosure comprises a nucleic acid sequence (e.g., mRNA) encoding F protein, M protein, and at least one universal T-cell epitope. In some embodiments, a PIV3 vaccine of the present disclosure comprises a nucleic acid sequence (e.g., mRNA) encoding F protein, P protein, and at least one universal T-cell epitope. In some embodiments, a PIV3 vaccine of the present disclosure comprises a nucleic acid sequence (e.g., mRNA) encoding F protein, N protein, and at least one universal T-cell epitope.

[0503] In some embodiments, a PIV3 vaccine of the present disclosure comprises a nucleic acid sequence (e.g., mRNA) encoding HN protein, M protein, and at least one universal T-cell epitope. In some embodiments, a PIV3 vaccine of the present disclosure comprises a nucleic acid sequence (e.g., mRNA) encoding HN protein, P protein, and at least one universal T-cell epitope. In some embodiments, a PIV3 vaccine of the present disclosure comprises a nucleic acid sequence (e.g., mRNA) encoding HN protein, N protein, and at least one universal T-cell epitope.

[0504] In some embodiments, a PIV3 vaccine of the present disclosure comprises a nucleic acid sequence (e.g., mRNA) encoding F protein, HN protein, M protein, and at least one universal T-cell epitope. In some embodiments, a PIV3 vaccine of the present disclosure comprises a nucleic acid sequence (e.g., mRNA) encoding F protein, HN protein, P protein, and at least one universal T-cell epitope. In some embodiments, a PIV3 vaccine of the present disclosure comprises a nucleic acid sequence (e.g., mRNA) encoding F protein, HN protein, N protein, and at least one universal T-cell epitope.

[0505] A PIV3 vaccine may comprise, for example, at least one RNA (e.g., mRNA) polynucleotide having an open reading frame encoding at least one PIV3 antigenic polypeptide identified by any one of SEQ ID NO: 12-13, and at least one universal T-cell epitope.

[0506] A PIV3 vaccine may comprise, for example, at least one RNA (e.g., mRNA) polynucleotide encoded by a nucleic acid (e.g., DNA) identified by any one of SEQ ID NO: 9-12, and at least one universal T-cell epitope.

[0507] The present disclosure is not limited by a particular strain of PIV3. The strain of PIV3 used in a vaccine may be any strain of PIV3. A non-limiting example of a strain of PIV3 for use as provide herein includes HPIV3/Homo sapiens/PER/FLA4815/2008.

[0508] In some embodiments, PIV3 vaccines comprise RNA (e.g., mRNA) polynucleotides encoding a PIV3 antigenic polypeptides having at least 95%, at least 96%, at least 97%, at least 98% or at least 99% identity with PIV3 F protein and having F protein activity.

[0509] In some embodiments, PIV3 vaccines comprise RNA (e.g., mRNA) polynucleotides encoding PIV3 antigenic polypeptides having at least 95%, at least 96%, at least 97%, at least 98% or at least 99% identity with PIV3 hemagglutinin-neuraminidase (HN) and having hemagglutinin-neuraminidase activity.

[0510] A protein is considered to have hemagglutinin-neuraminidase activity if, for example, it is capable of both receptor binding and receptor cleaving. Such proteins are major surface glycoproteins that have functional sites for cell attachment and for neuraminidase activity. They are able to cause red blood cells to agglutinate and to cleave the glycosidic linkages of neuraminic acids, so they have the potential to both bind a potential host cell and then release the cell if necessary, for example, to prevent self-aggregation of the virus.

[0511] In some embodiments, PIV3 vaccines comprise RNA (e.g., mRNA) polynucleotides encoding PIV3 antigenic polypeptides having at least 95%, at least 96%, at least 97%, at least 98% or at least 99% identity with PIV3 HN, F (e.g., F, Fl or F2), M, N, L or V and having HN, F (e.g., F, Fl or F2), M, N, L or V activity, respectively.

### Respiratory Syncytial Virus (RSV)

[0512] RSV is a negative-sense, single-stranded RNA virus of the genus Pneumovirinae. The virus is present in at least two antigenic subgroups, known as Group A and Group B, primarily resulting from differences in the surface G glycoproteins. Two RSV surface glycoproteins-G and F-mediate attachment with and attachment to cells of the respiratory epithelium. F surface glycoproteins mediate coalescence of neighboring cells. This results in the formation of syncytial cells. RSV is the most common cause of bronchiolitis. Most infected adults develop mild cold-like symptoms such as congestion, low-grade fever, and wheezing. Infants and small children may suffer more severe symptoms such as bronchiolitis and pneumonia. The disease may be transmitted among humans via contact with respiratory secretions.

[0513] The genome of RSV encodes at least three surface glycoproteins, including F, G, and SH, four nucleocapsid proteins, including L, P, N, and M2, and one matrix protein, M. Glycoprotein F directs viral penetration by fusion between the virion and the host membrane. Glycoprotein G is a type II transmembrane glycoprotein and is the major attachment protein. SH is a short integral membrane protein. Matrix protein M is found in the inner layer of the lipid bilayer and assists virion formation. Nucleocapsid proteins L, P, N, and M2 modulate replication and transcription of the RSV genome. It is thought that glycoprotein G tethers and stabilizes the virus particle at the surface of bronchial epithelial cells, while glycoprotein F interacts with cellular glycosaminoglycans to mediate fusion and delivery of the RSV virion contents into the host cell (Krzyzaniak M A et al. PLoS Pathog 2013; 9 (4)).

[0514] In some embodiments, a RSV vaccine of the present disclosure comprises a nucleic acid sequence (e.g., mRNA) encoding F protein, and a nucleic acid sequence (e.g., mRNA) encoding at least one universal T-cell epitope. In some embodiments, a PIV3 vaccine of the present disclosure comprises a nucleic acid sequence (e.g., mRNA) encoding G protein, and a nucleic acid sequence (e.g., mRNA) encoding at least one universal T-cell epitope. In some embodiments, a PIV3 vaccine of the present disclosure comprises a nucleic acid sequence (e.g., mRNA) encoding L protein, and a nucleic acid sequence (e.g., mRNA) encoding at least one universal T-cell epitope. In some embodiments, a PIV3 vaccine of the present disclosure comprises a nucleic acid sequence (e.g., mRNA) encoding P protein. In some embodiments, a PIV3 vaccine of the present disclosure comprises a nucleic acid sequence (e.g., mRNA) encoding N protein, and a nucleic acid sequence (e.g., mRNA) encoding at least one universal T-cell epitope. In some embodiments, a PIV3 vaccine of the present disclosure comprises a nucleic acid sequence (e.g., mRNA) encoding M2 protein, and a nucleic acid sequence (e.g., mRNA) encoding at least one universal T-cell epitope. In some embodiments, a PIV3 vaccine of the present disclosure comprises a nucleic acid sequence (e.g., mRNA) encoding M protein, and a nucleic acid sequence (e.g., mRNA) encoding at least one universal T-cell epitope.

[0515] In some embodiments, a RSV vaccine of the present disclosure comprises a nucleic acid sequence (e.g., mRNA) encoding F protein, G protein, L protein, P protein, N protein, M2 protein and M protein, and a nucleic acid sequence (e.g., mRNA) encoding at least one universal T-cell epitope.

[0516] In some embodiments, a RSV vaccine of the present disclosure comprises a nucleic acid sequence (e.g., mRNA) encoding F protein and G protein, and a nucleic acid sequence (e.g., mRNA) encoding at least one universal T-cell epitope. In some embodiments, a RSV vaccine of the present disclosure comprises a nucleic acid sequence (e.g., mRNA) encoding F protein and L protein, and a nucleic acid sequence (e.g., mRNA) encoding at least one universal T-cell epitope. In some embodiments, a RSV vaccine of the present disclosure comprises a nucleic acid sequence (e.g., mRNA) encoding F protein and P protein, and a nucleic acid sequence (e.g., mRNA) encoding at least one universal T-cell epitope. In some embodiments, a RSV vaccine of the present disclosure comprises a nucleic acid sequence (e.g., mRNA) encoding F protein and N protein, and a nucleic acid sequence (e.g., mRNA) encoding at least one universal T-cell epitope. In some embodiments, a RSV vaccine of the present disclosure comprises a nucleic acid sequence (e.g., mRNA) encoding F protein and M2 protein, and a nucleic acid sequence (e.g., mRNA) encoding at least one universal T-cell epitope. In some embodiments, a RSV vaccine of the present disclosure comprises a nucleic acid sequence (e.g., mRNA) encoding F protein and M protein, and a nucleic acid sequence (e.g., mRNA) encoding at least one universal T-cell epitope.

[0517] In some embodiments, a RSV vaccine of the present disclosure comprises a nucleic acid sequence (e.g., mRNA) encoding G protein and L protein, and a nucleic acid sequence (e.g., mRNA) encoding at least one universal T-cell epitope. In some embodiments, a RSV vaccine of the present disclosure comprises a nucleic acid sequence (e.g., mRNA) encoding G protein and P protein, and a nucleic acid sequence (e.g., mRNA) encoding at least one universal T-cell epitope. In some embodiments, a RSV vaccine of the present disclosure comprises a nucleic acid sequence (e.g., mRNA) encoding G protein and N protein, and a nucleic acid sequence (e.g., mRNA) encoding at least one universal T-cell epitope. In some embodiments, a RSV vaccine of the present disclosure comprises a nucleic acid sequence (e.g., mRNA) encoding G protein and M2 protein, and a nucleic acid sequence (e.g., mRNA) encoding at least one universal T-cell epitope. In some embodiments, a RSV vaccine of the present disclosure comprises a nucleic acid sequence (e.g., mRNA) encoding G protein and M protein, and a nucleic acid sequence (e.g., mRNA) encoding at least one universal T-cell epitope.

[0518] In some embodiments, a RSV vaccine of the present disclosure comprises a nucleic acid sequence (e.g., mRNA) encoding F protein, G protein and L protein, and a nucleic acid sequence (e.g., mRNA) encoding at least one universal T-cell epitope. In some embodiments, a RSV vaccine of the present disclosure comprises a nucleic acid sequence (e.g., mRNA) encoding F protein, G protein and P protein, and a nucleic acid sequence (e.g., mRNA) encoding at least one universal T-cell epitope. In some embodiments, a RSV vaccine of the present disclosure comprises a nucleic acid sequence (e.g., mRNA) encoding F protein, G protein and N protein, and a nucleic acid sequence (e.g., mRNA) encoding at least one universal T-cell epitope. In some embodiments, a RSV vaccine of the present disclosure comprises a nucleic acid sequence (e.g., mRNA) encoding F protein, G protein and M2 protein, and a nucleic acid sequence (e.g., mRNA) encoding at least one universal T-cell epitope. In some embodiments, a RSV vaccine of the present disclosure comprises a nucleic acid sequence (e.g., mRNA) encoding F protein, G protein and M protein, and a nucleic acid sequence (e.g., mRNA) encoding at least one universal T-cell epitope.

[0519] In some embodiments, a RSV vaccine of the present disclosure comprises a nucleic acid sequence (e.g., mRNA) encoding F protein, and a nucleic acid sequence (e.g., mRNA) encoding at least one universal T-cell epitope. In some embodiments, a PIV3 vaccine of the present disclosure comprises a nucleic acid sequence (e.g., mRNA) encoding G protein, and a nucleic acid sequence (e.g., mRNA) encoding at least one universal T-cell epitope. In some embodiments, a PIV3 vaccine of the present disclosure comprises a nucleic acid sequence (e.g., mRNA) encoding L protein, and a nucleic acid sequence (e.g., mRNA) encoding at least one universal T-cell epitope. In some embodiments, a PIV3 vaccine of the present disclosure comprises a nucleic acid sequence (e.g., mRNA) encoding P protein. In some embodiments, a PIV3 vaccine of the present disclosure comprises a nucleic acid sequence (e.g., mRNA) encoding N protein, and a nucleic acid sequence (e.g., mRNA) encoding at least one universal T-cell epitope. In some embodiments, a PIV3 vaccine of the present disclosure comprises a nucleic acid sequence (e.g., mRNA) encoding M2 protein, and a nucleic acid sequence (e.g., mRNA) encoding at least one universal T-cell epitope. In some embodiments, a PIV3 vaccine of the present disclosure comprises a nucleic acid sequence (e.g., mRNA) encoding M protein, and a nucleic acid sequence (e.g., mRNA) encoding at least one universal T-cell epitope.

[0520] In some embodiments, a RSV vaccine of the present disclosure comprises a nucleic acid sequence (e.g., mRNA) encoding F protein, G protein, L protein, P protein, N protein, M2 protein and M protein, and a nucleic acid sequence (e.g., mRNA) encoding at least one universal T-cell epitope.

[0521] In some embodiments, a RSV vaccine of the present disclosure comprises a nucleic acid sequence (e.g., mRNA) encoding F protein and G protein, and a nucleic acid sequence (e.g., mRNA) encoding at least one universal T-cell epitope. In some embodiments, a RSV vaccine of the present disclosure comprises a nucleic acid sequence (e.g., mRNA) encoding F protein and L protein, and a nucleic acid sequence (e.g., mRNA) encoding at least one universal T-cell epitope. In some embodiments, a RSV vaccine of the present disclosure comprises a nucleic acid sequence (e.g., mRNA) encoding F protein and P protein, and a nucleic acid sequence (e.g., mRNA) encoding at least one universal T-cell epitope. In some embodiments, a RSV vaccine of the present disclosure comprises a nucleic acid sequence (e.g., mRNA) encoding F protein and N protein, and a nucleic acid sequence (e.g., mRNA) encoding at least one universal T-cell epitope. In some embodiments, a RSV vaccine of the present disclosure comprises a nucleic acid sequence (e.g., mRNA) encoding F protein and M2 protein, and a nucleic acid sequence (e.g., mRNA) encoding at least one universal T-cell epitope. In some embodiments, a RSV vaccine of the present disclosure comprises a nucleic acid sequence (e.g., mRNA) encoding F protein and M protein, and a nucleic acid sequence (e.g., mRNA) encoding at least one universal T-cell epitope.

[0522] In some embodiments, a RSV vaccine of the present disclosure comprises a nucleic acid sequence (e.g., mRNA) encoding G protein and L protein, and a nucleic acid sequence (e.g., mRNA) encoding at least one universal T-cell epitope. In some embodiments, a RSV vaccine of the present disclosure comprises a nucleic acid sequence (e.g., mRNA) encoding G protein and P protein, and a nucleic acid sequence (e.g., mRNA) encoding at least one universal T-cell epitope. In some embodiments, a RSV vaccine of the present disclosure comprises a nucleic acid sequence (e.g., mRNA) encoding G protein and N protein, and a nucleic acid sequence (e.g., mRNA) encoding at least one universal T-cell epitope. In some embodiments, a RSV vaccine of the present disclosure comprises a nucleic acid sequence (e.g., mRNA) encoding G protein and M2 protein, and a nucleic acid sequence (e.g., mRNA) encoding at least one universal T-cell epitope. In some embodiments, a RSV vaccine of the present disclosure comprises a nucleic acid sequence (e.g., mRNA) encoding G protein and M protein, and a nucleic acid sequence (e.g., mRNA) encoding at least one universal T-cell epitope.

[0523] In some embodiments, a RSV vaccine of the present disclosure comprises a nucleic acid sequence (e.g., mRNA) encoding F protein, G protein and L protein, and a nucleic acid sequence (e.g., mRNA) encoding at least one universal T-cell epitope. In some embodiments, a RSV vaccine of the present disclosure comprises a nucleic acid sequence (e.g., mRNA) encoding F protein, G protein and P protein, and a nucleic acid sequence (e.g., mRNA) encoding at least one universal T-cell epitope. In some embodiments, a RSV vaccine of the present disclosure comprises a nucleic acid sequence (e.g., mRNA) encoding F protein, G protein and N protein, and a nucleic acid sequence (e.g., mRNA) encoding at least one universal T-cell epitope. In some embodiments, a RSV vaccine of the present disclosure comprises a nucleic acid sequence (e.g., mRNA) encoding F protein, G protein and M2 protein, and a nucleic acid sequence (e.g., mRNA) encoding at least one universal T-cell epitope. In some embodiments, a RSV vaccine of the present disclosure comprises a nucleic acid sequence (e.g., mRNA) encoding F protein, G protein and M protein, and a nucleic acid sequence (e.g., mRNA) encoding at least one universal T-cell epitope.

[0524] In some embodiments, a RSV vaccine of the present disclosure comprises a nucleic acid sequence (e.g., mRNA) encoding F protein, and at least one universal T-cell epitope. In some embodiments, a PIV3 vaccine of the present disclosure comprises a nucleic acid sequence (e.g., mRNA) encoding G protein, and at least one universal T-cell epitope. In some embodiments, a PIV3 vaccine of the present disclosure comprises a nucleic acid sequence (e.g., mRNA) encoding L protein, and at least one universal T-cell epitope. In some embodiments, a PIV3 vaccine of the present disclosure comprises a nucleic acid sequence (e.g., mRNA) encoding P protein. In some embodiments, a PIV3 vaccine of the present disclosure comprises a nucleic acid sequence (e.g., mRNA) encoding N protein, and at least one universal T-cell epitope. In some embodiments, a PIV3 vaccine of the present disclosure comprises a nucleic acid sequence (e.g., mRNA) encoding M2 protein, and at least one universal T-cell epitope. In some embodiments, a PIV3 vaccine of the present disclosure comprises a nucleic acid sequence (e.g., mRNA) encoding M protein, and at least one universal T-cell epitope.

[0525] In some embodiments, a RSV vaccine of the present disclosure comprises a nucleic acid sequence (e.g., mRNA) encoding F protein, G protein, L protein, P protein, N protein, M2 protein, M protein, and at least one universal T-cell epitope.

[0526] In some embodiments, a RSV vaccine of the present disclosure comprises a nucleic acid sequence (e.g., mRNA) encoding F protein, G protein, and at least one universal T-cell epitope. In some embodiments, a RSV vaccine of the present disclosure comprises a nucleic acid sequence (e.g., mRNA) encoding F protein, L protein, and at least one universal T-cell epitope. In some embodiments, a RSV vaccine of the present disclosure comprises a nucleic acid sequence (e.g., mRNA) encoding F protein, P protein, and at least one universal T-cell epitope. In some embodiments, a RSV vaccine of the present disclosure comprises a nucleic acid sequence (e.g., mRNA) encoding F protein, N protein, and at least one universal T-cell epitope. In some embodiments, a RSV vaccine of the present disclosure comprises a nucleic acid sequence (e.g., mRNA) encoding F protein, M2 protein, and at least one universal T-cell epitope. In some embodiments, a RSV vaccine of the present disclosure comprises a nucleic acid sequence (e.g., mRNA) encoding F protein, M protein, and at least one universal T-cell epitope.

[0527] In some embodiments, a RSV vaccine of the present disclosure comprises a nucleic acid sequence (e.g., mRNA) encoding G protein, L protein, and at least one universal T-cell epitope. In some embodiments, a RSV vaccine of the present disclosure comprises a nucleic acid sequence (e.g., mRNA) encoding G protein, P protein, and at least one universal T-cell epitope. In some embodiments, a RSV vaccine of the present disclosure comprises a nucleic acid sequence (e.g., mRNA) encoding G protein, N protein, and at least one universal T-cell epitope. In some embodiments, a RSV vaccine of the present disclosure comprises a nucleic acid sequence (e.g., mRNA) encoding G protein, M2 protein, and at least one universal T-cell epitope. In some embodiments, a RSV vaccine of the present disclosure comprises a nucleic acid sequence (e.g., mRNA) encoding G protein, M protein, and at least one universal T-cell epitope.

[0528] In some embodiments, a RSV vaccine of the present disclosure comprises a nucleic acid sequence (e.g., mRNA) encoding F protein, G protein, L protein, and at least one universal T-cell epitope. In some embodiments, a RSV vaccine of the present disclosure comprises a nucleic acid sequence (e.g., mRNA) encoding F protein, G protein, P protein, and at least one universal T-cell epitope. In some embodiments, a RSV vaccine of the present disclosure comprises a nucleic acid sequence (e.g., mRNA) encoding F protein, G protein. N protein, and at least one universal T-cell epitope. In some embodiments, a RSV vaccine of the present disclosure comprises a nucleic acid sequence (e.g., mRNA) encoding F protein, G protein, M2 protein, and at least one universal T-cell epitope. In some embodiments, a RSV vaccine of the present disclosure comprises a nucleic acid sequence (e.g., mRNA) encoding F protein, G protein, M protein, and at least one universal T-cell epitope.

[0529] The present disclosure is not limited by a particular strain of RSV. The strain of RSV used in a vaccine may be any strain of RSV.

[0530] In some embodiments, RSV vaccines comprise RNA (e.g., mRNA) polynucleotides encoding a RSV antigenic polypeptides having at least 95%, at least 96%, at least 97%, at least 98% or at least 99% identity with RSV F protein and having F protein activity.

[0531] In some embodiments, RSV vaccines comprise RNA (e.g., mRNA) polynucleotides encoding RSV antigenic polypeptides having at least 95%, at least 96%, at least 97%, at least 98% or at least 99% identity with RSV G protein and having G protein activity.

[0532] A protein is considered to have G protein activity if, for example, the protein acts to modulate (e.g., inhibit) hMPV-induced cellular (immune) responses (see, e.g., Bao X et al. PLoS Pathog. 2008; 4 (5): e 1000077, incorporated herein by reference).

### Measles Virus (MeV)

[0533] Molecular epidemiologic investigations and virologic surveillance contribute notably to the control and prevention of measles. Nearly half of measles-related deaths worldwide occur in India, yet virologic surveillance data are incomplete for many regions of the country. Previous studies have documented the presence of measles virus genotypes D4, D7, and D8 in India, and genotypes D5, D9, D11, H1, and G3 have been detected in neighboring countries. Recently, MeV genotype B3 was detected in India (Kuttiatt V S et al. Emerg Infect Dis. 2014; 20(10):1764-66).

[0534] The glycoprotein complex of paramyxoviruses mediates receptor binding and membrane fusion. In particular, the MeV fusion (F) protein executes membrane fusion, after receptor binding by the hemagglutinin (HA) protein (Muhlebach M D et al. Journal of Virology 2008; 82 (22): 11437-45). The MeV P gene codes for three proteins: P, an essential polymerase cofactor, and V and C, which have multiple functions but are not strictly required for viral propagation in cultured cells. V shares the amino-terminal domain with P but has a zinc-binding carboxyl-terminal domain, whereas C is translated from an overlapping reading frame. The MeV C protein is an infectivity factor. During replication, the P protein binds incoming monomeric nucleocapsid (N) proteins with its amino-terminal domain and positions them for assembly into the nascent ribonucleocapsid. The P protein amino-terminal domain is natively unfolded (Deveaux P et al. Journal of Virology 2004; 78 (21): 11632-40).

[0535] In some embodiments, a MeV vaccine of the present disclosure comprises a nucleic acid sequence (e.g., mRNA) encoding HA protein and a nucleic acid sequence (e.g., mRNA) encoding at least one universal T-cell epitope. In some embodiments, a MeV vaccine of the present disclosure comprises a nucleic acid sequence (e.g., mRNA) encoding F protein and a nucleic acid sequence (e.g., mRNA) encoding at least one universal T-cell epitope. In some embodiments, a MeV vaccine of the present disclosure comprises a nucleic acid sequence (e.g., mRNA) encoding P protein and a nucleic acid sequence (e.g., mRNA) encoding at least one universal T-cell epitope. In some embodiments, a MeV vaccine of the present disclosure comprises a nucleic acid sequence (e.g., mRNA) encoding V protein and a nucleic acid sequence (e.g., mRNA) encoding at least one universal T-cell epitope. In some embodiments, a MeV vaccine of the present disclosure comprises a nucleic acid sequence (e.g., mRNA) encoding C protein and a nucleic acid sequence (e.g., mRNA) encoding at least one universal T-cell epitope.

[0536] In some embodiments, a MeV vaccine of the present disclosure comprises a nucleic acid sequence (e.g., mRNA) encoding HA protein, F protein, P protein, V protein and C protein and a nucleic acid sequence (e.g., mRNA) encoding at least one universal T-cell epitope.

[0537] In some embodiments, a MeV vaccine of the present disclosure comprises a nucleic acid sequence (e.g., mRNA) encoding HA protein and F protein and a nucleic acid sequence (e.g., mRNA) encoding at least one universal T-cell epitope. In some embodiments, a MeV vaccine of the present disclosure comprises a nucleic acid sequence (e.g., mRNA) encoding HA protein and P protein and a nucleic acid sequence (e.g., mRNA) encoding at least one universal T-cell epitope. In some embodiments, a MeV vaccine of the present disclosure comprises a nucleic acid sequence (e.g., mRNA) encoding HA protein and V protein and a nucleic acid sequence (e.g., mRNA) encoding at least one universal T-cell epitope. In some embodiments, a MeV vaccine of the present disclosure comprises a nucleic acid sequence (e.g., mRNA) encoding HA protein and C protein and a nucleic acid sequence (e.g., mRNA) encoding at least one universal T-cell epitope.

[0538] some embodiments, a MeV vaccine of the present disclosure comprises a nucleic acid sequence (e.g., mRNA) encoding F protein and P protein and a nucleic acid sequence (e.g., mRNA) encoding at least one universal T-cell epitope. In some embodiments, a MeV vaccine of the present disclosure comprises a nucleic acid sequence (e.g., mRNA) encoding F protein and V protein and a nucleic acid sequence (e.g., mRNA) encoding at least one universal T-cell epitope. In some embodiments, a MeV vaccine of the present disclosure comprises a nucleic acid sequence (e.g., mRNA) encoding F protein and C protein and a nucleic acid sequence (e.g., mRNA) encoding at least one universal T-cell epitope.

[0539] In some embodiments, a MeV vaccine of the present disclosure comprises a nucleic acid sequence (e.g., mRNA) encoding HA protein, F protein and P protein and a nucleic acid sequence (e.g., mRNA) encoding at least one universal T-cell epitope. In some embodiments, a MeV vaccine of the present disclosure comprises a nucleic acid sequence (e.g., mRNA) encoding HA protein, F protein and V protein and a nucleic acid sequence (e.g., mRNA) encoding at least one universal T-cell epitope. In some embodiments, a MeV vaccine of the present disclosure comprises a nucleic acid sequence (e.g., mRNA) encoding HA protein, F protein and C protein and a nucleic acid sequence (e.g., mRNA) encoding at least one universal T-cell epitope.

[0540] In some embodiments, MeV vaccines comprise RNA (e.g., mRNA) encoding a MeV antigenic polypeptide having at least 95%, at least 96%, at least 97%, at least 98% or at least 99% identity with MeV HA protein and having MeV HA protein activity.

[0541] In some embodiments, MeV vaccines comprise RNA (e.g., mRNA) encoding a MeV antigenic polypeptide having at least 95%, at least 96%, at least 97%, at least 98% or at least 99% identity with MeV F protein and having MeV F protein activity.

[0542] A protein is considered to have HA protein activity if the protein mediates receptor binding and/or membrane fusion. MeV F protein executes membrane fusion, after receptor binding by the MeV HA protein.

[0543] A MeV vaccine may comprise, for example, at least one RNA (e.g., mRNA) polynucleotide having an open reading frame encoding at least one MeV antigenic polypeptide identified by any one of SEQ ID NO: 47-50 and a nucleic acid sequence (e.g., mRNA) encoding at least one universal T-cell epitope.

[0544] A MeV vaccine may comprise, for example, at least one RNA (e.g., mRNA) polynucleotide identified by any one of SEQ ID NO: 37, 40, 43, 46.

[0545] A MeV vaccine may comprise, for example, at least one RNA (e.g., mRNA) polynucleotide encoded by a nucleic acid (e.g., DNA) identified by any one of SEQ ID NO: 35, 36, 38, 39, 41, 42, 44 and 45 and a nucleic acid sequence (e.g., mRNA) encoding at least one universal T-cell epitope.

[0546] In some embodiments, a MeV vaccine of the present disclosure comprises a nucleic acid sequence (e.g., mRNA) encoding HA protein and at least one universal T-cell epitope. In some embodiments, a MeV vaccine of the present disclosure comprises a nucleic acid sequence (e.g., mRNA) encoding F protein and at least one universal T-cell epitope. In some embodiments, a MeV vaccine of the present disclosure comprises a nucleic acid sequence (e.g., mRNA) encoding P protein and at least one universal T-cell epitope. In some embodiments, a MeV vaccine of the present disclosure comprises a nucleic acid sequence (e.g., mRNA) encoding V protein and at least one universal T-cell epitope. In some embodiments, a MeV vaccine of the present disclosure comprises a nucleic acid sequence (e.g., mRNA) encoding C protein and at least one universal T-cell epitope.

[0547] In some embodiments, a MeV vaccine of the present disclosure comprises a nucleic acid sequence (e.g., mRNA) encoding HA protein, F protein, P protein, V protein, C protein and at least one universal T-cell epitope.

[0548] In some embodiments, a MeV vaccine of the present disclosure comprises a nucleic acid sequence (e.g., mRNA) encoding HA protein, F protein and at least one universal T-cell epitope. In some embodiments, a MeV vaccine of the present disclosure comprises a nucleic acid sequence (e.g., mRNA) encoding HA protein, P protein and at least one universal T-cell epitope. In some embodiments, a MeV vaccine of the present disclosure comprises a nucleic acid sequence (e.g., mRNA) encoding HA protein, V protein and at least one universal T-cell epitope. In some embodiments, a MeV vaccine of the present disclosure comprises a nucleic acid sequence (e.g., mRNA) encoding HA protein, C protein and at least one universal T-cell epitope.

[0549] some embodiments, a MeV vaccine of the present disclosure comprises a nucleic acid sequence (e.g., mRNA) encoding F protein, P protein, and at least one universal T-cell epitope. In some embodiments, a MeV vaccine of the present disclosure comprises a nucleic acid sequence (e.g., mRNA) encoding F protein, V protein, and at least one universal T-cell epitope. In some embodiments, a MeV vaccine of the present disclosure comprises a nucleic acid sequence (e.g., mRNA) encoding F protein, C protein, and at least one universal T-cell epitope.

[0550] In some embodiments, a MeV vaccine of the present disclosure comprises a nucleic acid sequence (e.g., mRNA) encoding HA protein, F protein, P protein, and at least one universal T-cell epitope. In some embodiments, a MeV vaccine of the present disclosure comprises a nucleic acid sequence (e.g., mRNA) encoding HA protein, F protein, V protein, and at least one universal T-cell epitope. In some embodiments, a MeV vaccine of the present disclosure comprises a nucleic acid sequence (e.g., mRNA) encoding HA protein, F protein, C protein, and at least one universal T-cell epitope.

[0551] A MeV vaccine may comprise, for example, at least one RNA (e.g., mRNA) polynucleotide having an open reading frame encoding at least one MeV antigenic polypeptide identified by any one of SEQ ID NO: 47-50 and at least one universal T-cell epitope.

[0552] A MeV vaccine may comprise, for example, at least one RNA (e.g., mRNA) polynucleotide identified by any one of SEQ ID NO: 37, 40, 43, 46.

[0553] A MeV vaccine may comprise, for example, at least one RNA (e.g., mRNA) polynucleotide encoded by a nucleic acid (e.g., DNA) identified by any one of SEQ ID NO: 35, 36, 38, 39, 41, 42, 44 and 45 and a nucleic acid sequence (e.g., mRNA) encoding at least one universal T-cell epitope.

[0554] The present disclosure is not limited by a particular strain of MeV. The strain of MeV used in a vaccine may be any strain of MeV. Non-limiting examples of strains of MeV for use as provide herein include B3/B3.1, C2, D4, D6, D7, D8, G3, H1, Moraten, Rubeovax, MVi/New Jersey. USA/45.05, MVi/Texas. USA/4.07, AIK-C, MVi/New York. USA/26.09/3, MVi/California.USA/16.03, MVi/Virginia.USA/15.09, MVi/California.USA/8.04, and MVi/Pennsylvania.USA/20.09.

[0555] MeV proteins may be from MeV genotype D4, D5, D7, D8, D9, D11, H1, G3 or B3. In some embodiments, a MeV HA protein or a MeV F protein is from MeV genotype D8. In some embodiments, a MeV HA protein or a MeV F protein is from MeV genotype B3.

### Coronaviruses

[0556] MERS-Co V. MERS-COV is a positive-sense, single-stranded RNA virus of the genus Betacoronavirus. The genomes are phylogenetically classified into two clades, clade A and clade B. It has a strong tropism for non-ciliated bronchial epithelial cells, evades the innate immune response and antagonizes interferon (IFN) production in infected cells. Dipeptyl peptidase 4 (DDP4, also known as CD26) has been identified as a functional cellular receptor for MERS-COV. Its enzymatic activity is not required for infection, although its amino acid sequence is highly conserved across species and is expressed in the human bronchial epithelium and kidneys. Most infected individuals develop severe acute respiratory illnesses, including fever, cough, and shortness of breath, and the virus can be fatal. The disease may be transmitted among humans, generally among those in close contact.

[0557] The genome of MERS-COV encodes at least four unique accessory proteins, such as 3, 4a, 4b and 5, two replicase proteins (open reading frame 1a and 1b), and four major structural proteins, including spike(S), envelope (E), nucleocapsid (N), and membrane (M) proteins (Almazan F et al. MBio 2013; 4 (5): e00650-13). The accessory proteins play nonessential roles in MERS-COV replication, but they are likely structural proteins or interferon antagonists, modulating in vivo replication efficiency and/or pathogenesis, as in the case of SARS-COV (Almazan F et al. MBio 2013; 4 (5): e00650-13; Totura A L et al. Curr Opin Virol 2012; 2(3):264-75; Scobey T et al. Proc Natl Acad Sci USA 2013; 110(40):16157-62). The other proteins of MERS-COV maintain different functions in virus replication. The E protein, for example, involves in virulence, and deleting the E-coding gene results in replication-competent and propagation-defective viruses or attenuated viruses (Almazan F et al. MBio 2013; 4(5):e00650-13). The S protein is particularly essential in mediating virus binding to cells expressing receptor dipeptidyl peptidase-4 (DPP4) through receptor-binding domain (RBD) in the S1 subunit, whereas the S2 subunit subsequently mediates virus entry via fusion of the virus and target cell membranes (Li F. J Virol 2015; 89(4):1954-64; Raj V S et al. Nature 2013; 495 (7440): 251-4).

[0558] In some embodiments, a MERS-COV vaccine of the present disclosure comprises a nucleic acid sequence (e.g., mRNA) encoding S protein, and a nucleic acid sequence (e.g., mRNA) encoding at least one universal T-cell epitope. In some embodiments, a MERS-CoV vaccine of the present disclosure comprises a nucleic acid sequence (e.g., mRNA) encoding the SI subunit of the S protein, and a nucleic acid sequence (e.g., mRNA) encoding at least one universal T-cell epitope. In some embodiments, a MERS-COV vaccine of the present disclosure comprises a nucleic acid sequence (e.g., mRNA) encoding the S2 subunit of the S protein, and a nucleic acid sequence (e.g., mRNA) encoding at least one universal T-cell epitope. In some embodiments, a MERS-COV vaccine of the present disclosure comprises a nucleic acid sequence (e.g., mRNA) encoding E protein, and a nucleic acid sequence (e.g., mRNA) encoding at least one universal T-cell epitope. In some embodiments, a MERS-CoV vaccine of the present disclosure comprises a nucleic acid sequence (e.g., mRNA) encoding N protein, and a nucleic acid sequence (e.g., mRNA) encoding at least one universal T-cell epitope. In some embodiments, a MERS-COV vaccine of the present disclosure comprises a nucleic acid sequence (e.g., mRNA) encoding M protein, and a nucleic acid sequence (e.g., mRNA) encoding at least one universal T-cell epitope.

[0559] In some embodiments, a MERS-COV vaccine of the present disclosure comprises a nucleic acid sequence (e.g., mRNA) encoding S protein (S, S1 and/or S2), E protein, N protein and M protein, and a nucleic acid sequence (e.g., mRNA) encoding at least one universal T-cell epitope.

[0560] In some embodiments, a MERS-COV vaccine of the present disclosure comprises a nucleic acid sequence (e.g., mRNA) encoding S protein (S, S1 and/or S2) and E protein, and a nucleic acid sequence (e.g., mRNA) encoding at least one universal T-cell epitope. In some embodiments, a MERS-COV vaccine of the present disclosure comprises a nucleic acid sequence (e.g., mRNA) encoding S protein (S, S1 and/or S2) and N protein, and a nucleic acid sequence (e.g., mRNA) encoding at least one universal T-cell epitope. In some embodiments, a MERS-COV vaccine of the present disclosure comprises a nucleic acid sequence (e.g., mRNA) encoding S protein (S, S1 and/or S2) and M protein, and a nucleic acid sequence (e.g., mRNA) encoding at least one universal T-cell epitope.

[0561] In some embodiments, a MERS-COV vaccine of the present disclosure comprises a nucleic acid sequence (e.g., mRNA) encoding S protein (S, S1 and/or S2), E protein and M protein, and a nucleic acid sequence (e.g., mRNA) encoding at least one universal T-cell epitope. In some embodiments, a MERS-COV vaccine of the present disclosure comprises a nucleic acid sequence (e.g., mRNA) encoding S protein (S, S1 and/or S2), E protein and N protein, and a nucleic acid sequence (e.g., mRNA) encoding at least one universal T-cell epitope. In some embodiments, a MERS-COV vaccine of the present disclosure comprises a nucleic acid sequence (e.g., mRNA) encoding S protein (S, S1 and/or S2), M protein and N protein, and a nucleic acid sequence (e.g., mRNA) encoding at least one universal T-cell epitope. In some embodiments, a MERS-COV vaccine of the present disclosure comprises a nucleic acid sequence (e.g., mRNA) encoding E protein, M protein and N protein, and a nucleic acid sequence (e.g., mRNA) encoding at least one universal T-cell epitope.

[0562] A MERS-COV vaccine may comprise, for example, at least one RNA (e.g., mRNA) polynucleotide having an open reading frame encoding at least one MERS-COV antigenic polypeptide identified by any one of SEQ ID NO: 24-38 or 33, and a nucleic acid sequence (e.g., mRNA) encoding at least one universal T-cell epitope.

[0563] A MERS-COV vaccine may comprise, for example, at least one RNA (e.g., mRNA) polynucleotide encoded by a nucleic acid (e.g., DNA) identified by any one of SEQ ID NO: 20-23, and a nucleic acid sequence (e.g., mRNA) encoding at least one universal T-cell epitope.

[0564] In some embodiments, a MERS-COV vaccine of the present disclosure comprises a nucleic acid sequence (e.g., mRNA) encoding S protein, and at least one universal T-cell epitope. In some embodiments, a MERS-COV vaccine of the present disclosure comprises a nucleic acid sequence (e.g., mRNA) encoding the SI subunit of the S protein, and at least one universal T-cell epitope. In some embodiments, a MERS-COV vaccine of the present disclosure comprises a nucleic acid sequence (e.g., mRNA) encoding the S2 subunit of the S protein, and at least one universal T-cell epitope. In some embodiments, a MERS-CoV vaccine of the present disclosure comprises a nucleic acid sequence (e.g., mRNA) encoding E protein, and at least one universal T-cell epitope. In some embodiments, a MERS-CoV vaccine of the present disclosure comprises a nucleic acid sequence (e.g., mRNA) encoding N protein, and at least one universal T-cell epitope. In some embodiments, a MERS-CoV vaccine of the present disclosure comprises a nucleic acid sequence (e.g., mRNA) encoding M protein, and at least one universal T-cell epitope.

[0565] In some embodiments, a MERS-COV vaccine of the present disclosure comprises a nucleic acid sequence (e.g., mRNA) encoding S protein (S, S1 and/or S2), E protein, N protein, M protein, and at least one universal T-cell epitope.

[0566] In some embodiments, a MERS-COV vaccine of the present disclosure comprises a nucleic acid sequence (e.g., mRNA) encoding S protein (S, S1 and/or S2), E protein, and at least one universal T-cell epitope. In some embodiments, a MERS-COV vaccine of the present disclosure comprises a nucleic acid sequence (e.g., mRNA) encoding S protein (S, S1 and/or S2), N protein, and at least one universal T-cell epitope. In some embodiments, a MERS-CoV vaccine of the present disclosure comprises a nucleic acid sequence (e.g., mRNA) encoding S protein (S, S1 and/or S2), M protein, and at least one universal T-cell epitope.

[0567] In some embodiments, a MERS-COV vaccine of the present disclosure comprises a nucleic acid sequence (e.g., mRNA) encoding S protein (S, S1 and/or S2), E protein. M protein, and at least one universal T-cell epitope. In some embodiments, a MERS-COV vaccine of the present disclosure comprises a nucleic acid sequence (e.g., mRNA) encoding S protein (S, S1 and/or S2), E protein, N protein, and at least one universal T-cell epitope. In some embodiments, a MERS-COV vaccine of the present disclosure comprises a nucleic acid sequence (e.g., mRNA) encoding S protein (S. S1 and/or S2), M protein, N protein, and at least one universal T-cell epitope. In some embodiments, a MERS-COV vaccine of the present disclosure comprises a nucleic acid sequence (e.g., mRNA) encoding E protein, M protein, N protein, and at least one universal T-cell epitope.

[0568] A MERS-COV vaccine may comprise, for example, at least one RNA (e.g., mRNA) polynucleotide having an open reading frame encoding at least one MERS-COV antigenic polypeptide identified by any one of SEQ ID NO: 24-38 or 33 and at least one universal T-cell epitope.

[0569] A MERS-COV vaccine may comprise, for example, at least one RNA (e.g., mRNA) polynucleotide encoded by a nucleic acid (e.g., DNA) identified by any one of SEQ ID NO: 20-23, and at least one universal T-cell epitope.

[0570] The present disclosure is not limited by a particular strain of MERS-COV. The strain of MERS-COV used in a vaccine may be any strain of MERS-COV. Non-limiting examples of strains of MERS-COV for use as provide herein include Riyadh_14_2013, and 2cEMC/2012, Hasa_1_2013.

[0571] SARS-COV. The genome of SARS-COV includes of a single, positive-strand RNA that is approximately 29,700 nucleotides long. The overall genome organization of SARS-COV is similar to that of other coronaviruses. The reference genome includes 13 genes, which encode at least 14 proteins. Two large overlapping reading frames (ORFs) encompass 71% of the genome. The remainder has 12 potential ORFs, including genes for structural proteins S (spike), E (small envelope), M (membrane), and N (nucleocapsid). Other potential ORFs code for unique putative SARS-COV-specific polypeptides that lack obvious sequence similarity to known proteins. A detailed analysis of the SARS-COV genome has been published in J Mol Biol 2003; 331:991-1004.

[0572] In some embodiments, a SARS-COV vaccine of the present disclosure comprises a RNA (e.g., mRNA) polynucleotide encoding S protein (S, S1 and/or S2), E protein, N protein and M protein, and a RNA (e.g., mRNA) polynucleotide encoding a T-cell epitope.

[0573] In some embodiments, a SARS-COV vaccine of the present disclosure comprises a RNA (e.g., mRNA) polynucleotide encoding S protein (S, S1 and/or S2) and E protein, and a RNA (e.g., mRNA) polynucleotide encoding a T-cell epitope. In some embodiments, a SARS-CoV vaccine of the present disclosure comprises a RNA (e.g., mRNA) polynucleotide encoding S protein (S, S1 and/or S2) and N protein, and a RNA (e.g., mRNA) polynucleotide encoding a T-cell epitope. In some embodiments, a SARS-COV vaccine of the present disclosure comprises a RNA (e.g., mRNA) polynucleotide encoding S protein (S, S1 and/or S2) and M protein, and a RNA (e.g., mRNA) polynucleotide encoding a T-cell epitope.

[0574] In some embodiments, a SARS-COV vaccine of the present disclosure comprises a RNA (e.g., mRNA) polynucleotide encoding S protein (S, S1 and/or S2), E protein and M protein, and a RNA (e.g., mRNA) polynucleotide encoding a T-cell epitope. In some embodiments, a SARS-COV vaccine of the present disclosure comprises a RNA (e.g., mRNA) polynucleotide encoding S protein (S, S1 and/or S2), E protein and N protein, and a RNA (e.g., mRNA) polynucleotide encoding a T-cell epitope. In some embodiments, a SARS-CoV vaccine of the present disclosure comprises a RNA (e.g., mRNA) polynucleotide encoding S protein (S, S1 and/or S2), M protein and N protein, and a RNA (e.g., mRNA) polynucleotide encoding a T-cell epitope. In some embodiments, a SARS-COV vaccine of the present disclosure comprises a RNA (e.g., mRNA) polynucleotide encoding E protein, M protein and N protein, and a RNA (e.g., mRNA) polynucleotide encoding a T-cell epitope.

[0575] A SARS-COV vaccine may comprise, for example, at least one RNA (e.g., mRNA) polynucleotide having an open reading frame encoding at least one SARS-COV antigenic polypeptide identified by any one of SEQ ID NO: 29, 32 or 34, and a RNA (e.g., mRNA) polynucleotide encoding a T-cell epitope.

[0576] In some embodiments, a SARS-COV vaccine of the present disclosure comprises a RNA (e.g., mRNA) polynucleotide encoding S protein (S. S1 and/or S2), E protein, N protein, M protein, and a T-cell epitope.

[0577] In some embodiments, a SARS-COV vaccine of the present disclosure comprises a RNA (e.g., mRNA) polynucleotide encoding S protein (S, S1 and/or S2), E protein, and a T-cell epitope. In some embodiments, a SARS-COV vaccine of the present disclosure comprises a RNA (e.g., mRNA) polynucleotide encoding S protein (S, S1 and/or S2), N protein, and a T-cell epitope. In some embodiments, a SARS-COV vaccine of the present disclosure comprises a RNA (e.g., mRNA) polynucleotide encoding S protein (S, S1 and/or S2), M protein, and a T-cell epitope.

[0578] In some embodiments, a SARS-COV vaccine of the present disclosure comprises a RNA (e.g., mRNA) polynucleotide encoding S protein (S, S1 and/or S2), E protein, M protein, and a T-cell epitope. In some embodiments, a SARS-COV vaccine of the present disclosure comprises a RNA (e.g., mRNA) polynucleotide encoding S protein (S, S1 and/or S2), E protein, N protein, and a T-cell epitope. In some embodiments, a SARS-COV vaccine of the present disclosure comprises a RNA (e.g., mRNA) polynucleotide encoding S protein (S. S1 and/or S2), M protein, N protein, and a T-cell epitope. In some embodiments, a SARS-CoV vaccine of the present disclosure comprises a RNA (e.g., mRNA) polynucleotide encoding E protein, M protein, N protein, and a T-cell epitope.

[0579] A SARS-COV vaccine may comprise, for example, at least one RNA (e.g., mRNA) polynucleotide having an open reading frame encoding at least one SARS-COV antigenic polypeptide identified by any one of SEQ ID NO: 29, 32 or 34, and a T-cell epitope.

[0580] The present disclosure is not limited by a particular strain of SARS-COV. The strain of SARS-COV used in a vaccine may be any strain of SARS-COV.

[0581] SARS-COV-2. Severe acute respiratory syndrome coronavirus 2 (SARS-COV-2, commonly known as COVID-19) is a novel enveloped betacoronavirus closely related to two bat-derived severe acute respiratory syndrome (SARS)-like coronaviruses. (Lu et al., 2020) Infection with COVID-19 was first described in China in December of 2019, but in the ensuing months became a worldwide pandemic. The genome of SARS-COV-2 includes of a single, positive-strand RNA that is approximately 29,700 nucleotides long. The overall genome organization of SARS-COV-2 is similar to that of other coronaviruses. The reference genome includes 13 genes, which encode at least 14 proteins. Two large overlapping reading frames (ORFs) encompass 71% of the genome. The remainder has 12 potential ORFs, including genes for structural proteins S (spike), E (small envelope), M (membrane), and N (nucleocapsid). Other potential ORFs code for unique putative SARS-COV-specific polypeptides that lack obvious sequence similarity to known proteins. A detailed analysis of the SARS-COV genome has been published in J Mol Biol 2003; 331:991-1004.

[0582] In some embodiments, a SARS-COV-2 vaccine of the present disclosure comprises a nucleic acid sequence (e.g., mRNA) encoding S protein (S, S1 and/or S2), and a nucleic acid sequence (e.g., mRNA) encoding at least one universal T-cell epitope. In some embodiments, the universal T-cell epitope can be derived from viral proteins other than S, that are highly conserved among the variants or/and in other coronaviruses.

[0583] In some embodiments, a SARS-COV-2 vaccine of the present disclosure can include a nucleic acid sequence (e.g., mRNA) encoding S protein (S, S1 and/or S2) with two proline substitutions for preventing the pre-fusion to post-fusion confirmation transition (SCIENCE, Vol 369, Issue 6510, pp. 1501-1505), and a nucleic acid sequence (e.g., mRNA) encoding at least one universal T-cell epitope. In some embodiments, the T-cell epitope can be highly conserved among the variants or/and in other coronaviruses.

[0584] In some embodiments, a SARS-COV-2 vaccine of the present disclosure comprises a nucleic acid sequence (e.g., mRNA) encoding S protein (S, S1 and/or S2) and full-length or truncated N protein and/or M protein, a nucleic acid sequence (e.g., mRNA) encoding at least one universal T-cell epitope. The universal T-cell epitope can be highly conserved among the variants or/and in other coronaviruses (e.g., SEQ ID NO: 323, 324, 335, 336, 337 and 338). In some embodiments, a SARS-COV-2 vaccine of the present disclosure comprises a nucleic acid sequence (e.g., mRNA) encoding S protein (S, S1 and/or S2) (e.g., SEQ ID NO: 321, 322, 325, 326, 327, 328, 323, 324) and a nucleic acid sequence (e.g., mRNA) encoding at least one universal T-cell epitopes (e.g., SEQ ID NO: 329, 330, and 351-450). In some embodiments, a SARS-COV-2 vaccine of the present disclosure comprises a nucleic acid sequence (e.g., mRNA) encoding S protein (S, S1 and/or S2) (e.g., SEQ ID NO: 321, 322, 325, 326, 327, 328, 323, 324) and a nucleic acid sequence (e.g., mRNA) encoding multiple universal T-cell epitopes (e.g., SEQ ID NO: 329, 330, and 351-450). In some embodiments, a SARS-COV-2 vaccine of the present disclosure comprises a nucleic acid sequence (e.g., mRNA) encoding S protein (S, S1 and/or S2) and M protein, and a nucleic acid sequence (e.g., mRNA) encoding at least one universal T-cell epitope.

[0585] A SARS-COV-2 vaccine may include, for example, at least one nucleic acid sequence (e.g., mRNA) having an open reading frame encoding at least one SARS-COV-2 antigenic polypeptide identified by any one of SEQ ID NO: 321, 322, 325, 326, 327, or 328 (see Table 1) and a nucleic acid sequence (e.g., mRNA) encoding at least one universal T-cell epitope identified by any one of SEQ ID NO: 329-332, 351-450, in the Table 1, and in the Table 2, all the T cell epitopes in the mRNA are listed.

[0586] A SARS-COV-2 vaccine may comprise, for example, at least one nucleic acid sequence (e.g., mRNA) having an open reading frame encoding at least one SARS-COV2 antigenic polypeptide identified by any one of SEQ ID NO: 321, 322, 325 or 326 (Table 1) and at least one universal T-cell epitope identified by any one of SEQ ID NO: 329, 330, 351-450 (Table 1 and Table 2).

[0587] In some embodiments, a SARS-COV-2 antigenic polypeptide is encoded by at least one nucleic acid sequence selected from any of SEQ ID NO: 322-324, 326, 328, 330-332, 334, or 336 (Table 1) and homologs having at least 80% identity with a nucleic acid sequence selected from any one of SEQ ID NO: 322-324, 326, 328, 330-332, 334, or 336 (Table 1). In some embodiments, a SARS-COV-2 antigenic polypeptide is encoded by at least one nucleic acid sequence selected from any one of SEQ ID NO: 322-324, 326, 328, 330-332, 334, or 336 (Table 1) and homologs having at least 90% (e.g. 90%, 91%, 92%, 93%, 94%, 95%, 96%, 97%, 98%, 99%, 99.8%, or 99.9%) identity with a nucleic acid sequence selected from any one of SEQ ID NO: 322-324, 326, 328, 330-332, 334, or 336 (Table 1). In some embodiments, a SARS-COV-2 antigenic polypeptide is encoded by at least one fragment of a nucleic acid sequence selected from any one of SEQ ID NO: 322-324, 326, 328, 330-332, 334, or 336 (Table 1). In some embodiments, the at least one nucleic acid has a chemical modification.

[0588] In some embodiments, a universal T-cell epitope is encoded by at least one nucleic acid sequence selected from any of SEQ ID NO: 329, 330, 351-450 (Table 1 and Table 2) and homologs having at least 80% identity with a nucleic acid sequence selected from any one of SEQ ID NO: 329, 330, 351-450 (Table 1 and Table 2). In some embodiments a universal T-cell epitope is encoded by at least one nucleic acid sequence selected from any one of SEQ ID NO: 329, 330, 351-450 (Table 1 and Table 2) and homologs having at least 90% (e.g. 90%, 91%, 92%, 93%, 94%, 95%, 96%, 97%, 98%, 99%, 99.8%, or 99.9%) identity with a nucleic acid sequence selected from any one of SEQ ID NO: 329, 330, 351-450 (Table 1 and Table 2). In some embodiments, a universal T-cell epitope is encoded by at least one fragment of a nucleic acid sequence selected from any one of SEQ ID NO: 329, 330, 351-450 (Table 1 and Table 2). In some embodiments, the at least one nucleic acid has a chemical modification.

[0589] In some embodiments, the SARS-COV-2 antigenic polypeptide is selected from any of SEQ ID NO: 321, 325, 327, 329, 333, or 335 (Table 1) and homologs having at least 80% identity with a SARS-COV-2 antigenic polypeptide selected from any one of SEQ ID NO: 321, 325, 327, 329, 333, or 335 (Table 1). In some embodiments, SARS-COV-2 antigenic polypeptide selected from any one of SEQ ID NO: 321, 325, 327, 329, 333, or 335 (Table 1) and homologs having at least 90% (e.g. 90%, 91%, 92%, 93%, 94%, 95%, 96%, 97%, 98%, 99%, 99.8%, or 99.9%) identity with a SARS-COV-2 antigenic polypeptide selected from any one of SEQ ID NO: 321, 325, 327, 329, 333, or 335 (Table 1). In some embodiments, a SARS-CoV-2 antigenic polypeptide is selected from any one of SEQ ID NO: 321, 325, 327, 329, 333, or 335 (Table 1).

[0590] The present disclosure is not limited by a particular strain of SARS-COV-2. The strain of SARS-COV-2 used in a vaccine may be any variants of SARS-COV-2 and strain of SARS-CoV, which includes HCoV-OC43, HCoV-HKU1, HCoV-NL63 or HCoV-229E

[0591] HCoV-OC43. Human coronavirus OC43 is an enveloped, positive-sense, single-stranded RNA virus in the species Betacoronavirus-1 (genus Betacoronavirus, subfamily Coronavirinae, family Coronaviridae, order Nidovirales). Four HCoV-OC43 genotypes (A to D), have been identified with genotype D most likely arising from recombination. The complete genome sequencing of two genotype C and D strains and bootscan analysis shows recombination events between genotypes B and C in the generation of genotype D. Of 29 strains identified, none belong to the more ancient genotype A. Along with HCoV-229E, a species in the Alphacoronavirus genus, HCoV-OC43 are among the known viruses that cause the common cold. Both viruses can cause severe lower respiratory tract infections, including pneumonia in infants, the elderly, and immunocompromised individuals such as those undergoing chemotherapy and those with HIV-AIDS.

[0592] HCoV-HKU1. Human coronavirus HKU1 (HCoV-HKU1) is a positive-sense, single-stranded RNA virus with the HE gene, which distinguishes it as a group 2, or Betacoronavirus. It was discovered in January 2005 in two patients in Hong Kong. The genome of HCoV-HKU1 is a 29,926-nucleotide, polyadenylated RNA. The GC content is 32%, the lowest among all known coronaviruses. The genome organization is the same as that of other group II coronaviruses, with the characteristic gene order 1a, 1b, HE, S, E, M, and N. Furthermore, accessory protein genes are present between the S and E genes (ORF4) and at the position of the N gene (ORF8). The TRS is presumably located within the AAUCUAAAC sequence, which precedes each ORF except E. As in sialodacryoadenitis virus and mouse hepatitis virus (MHV), translation of the E protein possibly occurs via an internal ribosomal entry site. The 3′ untranslated region contains a predicted stem-loop structure immediately downstream of the N ORF (nucleotide position 29647 to 29711). Further downstream, a pseudoknot structure is present at nucleotide position 29708 to 29760. Both RNA structures are conserved in group II coronaviruses and are critical for virus replication.

[0593] HCoV-NL63. The RNA genome of human coronavirus NL63 (HCoV-NL63) is 27,553 nucleotides, with a poly(A) tail (FIG. 1). With a GC content of 34%, HCoV-NL63 has one of the lowest GC contents of the coronaviruses, for which GC content ranges from 32 to 42%. Untranslated regions of 286 and 287 nucleotides are present at the 5′ and 3′ termini, respectively. Genes predicted to encode the S, E, M, and N proteins are found in the 3′ part of the HCoV-NL63 genome. The HE gene, which is present in some group II coronaviruses, is absent, and there is only a single, monocistronic accessory protein ORF (ORF3) located between the S and E genes. Subgenomic mRNAs are generated for all ORFs (S, ORF3, E, M, and N), and the core sequence of the TRS of HCoV-NL63 is defined as AACUAAA. This sequence is situated upstream of every ORF except for the E ORF, which contains the suboptimal core sequence AACUAUA. Interestingly, a 13-nucleotide sequence with perfect homology to the leader sequence is situated upstream of the suboptimal E TRS. Annealing of this 13-nucleotide sequence to the leader sequence may act as a compensatory mechanism for the disturbed leader-TRS/body-TRS interaction.

[0594] HCoV-229E. Human coronavirus 229E (HCoV-229E) is a single-stranded, positive-sense, RNA virus species in the Alphacoronavirus genus of the subfamily Coronavirinae, in the family Coronaviridae, of the order Nidovirales. Along with Human coronavirus OC43, it is responsible for the common cold. HCoV-NL63 and HCoV-229E are two of the four human coronaviruses that circulate worldwide. These two viruses are unique in their relationship towards each other. Phylogenetically, the viruses are more closely related to each other than to any other human coronavirus, yet they only share 65% sequence identity. Moreover, the viruses use different receptors to enter their target cell. HCoV-NL63 is associated with croup in children, whereas all signs suggest that the virus probably causes the common cold in healthy adults. HCoV-229E is a proven common cold virus in healthy adults, so it is probable that both viruses induce comparable symptoms in adults, even though their mode of infection differs (HCoV-NL63 and HCoV-229E are two of the four human coronaviruses that circulate worldwide. These two viruses are unique in their relationship towards each other. Phylogenetically, the viruses are more closely related to each other than to any other human coronavirus, yet they only share 65% sequence identity. Moreover, the viruses use different receptors to enter their target cell. HCoV-NL63 is associated with croup in children, whereas all signs suggest that the virus probably causes the common cold in healthy adults. HCoV-229E is a proven common cold virus in healthy adults, so it is probable that both viruses induce comparable symptoms in adults, even though their mode of infection differs (Dijkman R. et al. J Formos Med Assoc. 2009 April; 108 (4): 270-9, the contents of which is incorporated herein by reference in their entirety).

[0595] Feline coronavirus (FCoV). Feline infectious peritonitis (FIP) is a viral disease of cats caused by feline coronavirus. It is a coronavirus of the species Alphacoronavirus 1 which has two different forms: feline enteric coronavirus (FECV) that infects the intestines and feline infectious peritonitis virus (FIPV) that causes the disease feline infectious peritonitis (FIP). Most strains of feline coronavirus are found in the gastrointestinal tract and do not cause significant disease. These are referred to as feline enteric coronavirus (FeCV). Cats infected with FeCV usually do not show any symptoms during the initial viral infection, and in approximately 10 percent of cats infected with FeCV, one or more mutations of the virus can alter its biological behavior, resulting in white blood cells becoming infected with virus and spreading it throughout the cat's body. When this occurs, the virus is referred to as the FIPV, and this disease is usually progressive and almost always fatal without therapy that has recently become available.

[0596] In some embodiments, compositions can include a nucleic acid sequence (e.g., mRNA) encoding FCoV antigenic polypeptide and at least one universal T-cell epitope.

[0597] In some embodiments, compositions can include a nucleic acid sequence (e.g., SEQ ID NO: 541 (Table 4)) (e.g., mRNA) encoding FCOV Spike protein antigenic polypeptide (e.g., SEQ ID NO: 540 (Table 4)) and at least one universal T-cell epitope. SEQ ID NOs: 542-602 (Table 5)

[0598] In some embodiments, a FCOV antigenic polypeptide is encoded by at least one nucleic acid sequence selected from any of SEQ ID NOs: 541, 634, 636,638, 640, 642, and 644 (Table 4) and homologs having at least 80% identity with a nucleic acid sequence selected from any one of SEQ ID NOs: 541, 634, 636,638, 640, 642, and 644 (Table 4). In some embodiments, a FCoV antigenic polypeptide is encoded by at least one nucleic acid sequence selected from any one of SEQ ID NOs: 541, 634, 636,638, 640, 642, and 644 (Table 4) and homologs having at least 90% (e.g. 90%, 91%, 92%, 93%, 94%, 95%, 96%, 97%, 98%, 99%, 99.8%, or 99.9%) identity with a nucleic acid sequence selected from any one of SEQ ID NOs: 541, 634, 636,638, 640, 642, and 644 (Table 4). In some embodiments, a FCOV antigenic polypeptide is encoded by at least one fragment of a nucleic acid sequence selected from any one of SEQ ID NOs: 541, 634, 636,638, 640, 642, and 644 (Table 4). In some embodiments, the at least one nucleic acid has a chemical modification.

[0599] In some embodiments, a universal T-cell epitope is encoded by at least one nucleic acid sequence selected from any of SEQ ID NOs: 542-602 (Table 5) and homologs having at least 80% identity with a nucleic acid sequence selected from any one of SEQ ID NOs: 542-602 (Table 5). In some embodiments, a universal T-cell epitope is encoded by at least one nucleic acid sequence selected from any one of SEQ ID NOs: 542-602 (Table 5) and homologs having at least 90% (e.g. 90%, 91%, 92%, 93%, 94%, 95%, 96%, 97%, 98%, 99%, 99.8%, or 99.9%) identity with a nucleic acid sequence selected from any one of SEQ ID NOs: 542-602 (Table 5). In some embodiments, a universal T-cell epitope is encoded by at least one fragment of a nucleic acid sequence selected from any one of SEQ ID NOs: 542-602 (Table 5). In some embodiments, the at least one nucleic acid has a chemical modification.

[0600] A FCoV vaccine may include, for example, at least one nucleic acid sequence (e.g., mRNA) having an open reading frame encoding at least one FCoV antigenic polypeptide identified by any one of SEQ ID NOs: 540, 633, 635, 637, 639, 641, and 643 (see Table 4) and a nucleic acid sequence (e.g., mRNA) encoding at least one universal T-cell epitope identified by any one of SEQ ID NOs: 542-602 (Table 5).

[0601] A FCoV vaccine may comprise, for example, at least one nucleic acid sequence (e.g., mRNA) having an open reading frame encoding at least one FCOV antigenic polypeptide identified by any one of SEQ ID NOs: 540, 633, 635, 637, 639, 641, and 643 (see Table 4) and at least one universal T-cell epitope identified by any one of SEQ ID NOs: 542-602 (Table 5).

[0602] In some embodiments, the FCOV antigenic polypeptide is selected from any of SEQ ID NOs: 540, 633, 635, 637, 639, 641, and 643 (Table 4) and homologs having at least 80% identity with a FCOV antigenic polypeptide selected from any one of SEQ ID NOs: 540, 633, 635, 637, 639, 641, and 643 (Table 4). In some embodiments, FCOV antigenic polypeptide selected from any one of SEQ ID NOs: 540, 633, 635, 637, 639, 641, and 643 (Table 4) and homologs having at least 90% (e.g. 90%, 91%, 92%, 93%, 94%, 95%, 96%, 97%, 98%, 99%, 99.8%, or 99.9%) identity with a FCOV antigenic polypeptide selected from any one of SEQ ID NOs: 540, 633, 635, 637, 639, 641, and 643 (Table 4). In some embodiments, a FCoV antigenic polypeptide is selected from any one of SEQ ID NOs: 540, 633, 635, 637, 639, 641, and 643 (Table 4).

### Poxvirus

[0603] Monkeypox. Monkeypox (MPX) is a disease that is caused by infection with the monkeypox virus, which belongs to the Orthopoxvirus genus, which includes the variola (smallpox) virus, Ectromelia virus (mousepox) virus and vaccinia virus. All the members of the poxviridae comprise a large family of complex DNA viruses that replicate in the cytoplasm of vertebrate and invertebrate cells. In humans, smallpox was by far the most important poxvirus infection, however, human also can be infected with other poxviruses such as monkeypox, and recently there has been a marked increase in reported cases where monkeypox is not commonly seen, such as in United States, Canada and Europe. Vaccinia virus was used as live vaccine to immunize against smallpox. Successful worldwide vaccination with Vaccinia virus worldwide eventually led to the eradication of variola virus. However, vaccinia vaccine can produce severe disease and even death in elderly or immunocompromised people, therefore, there is unmet need for development of a universal vaccine against poxvirus infection including but not limited to monkeypox.

[0604] All the members in Orthopoxviruses (OPVs), including MPX, form two types of infectious viral particles: the mature virus (MV), which is cytosolic, and the enveloped virus (EV), which is extracellular. It is believed that MVs are required for viral entry into the host, while EVs are responsible for spread within the host. Previous studies have found that antibodies to an MV proteins, i.e., A33R, LIR, B5R, as well as viral secreted protein such as B16R, were highly effective for preventing virus spreading in vivo as well as curing a mousepox infection when administered post-exposure to virus J Virol. 2013 June; 87 (12): 7046-7053., which indicates that including these viral proteins might be a good strategy for a new vaccine against poxvirus infection, i.e., MPX.

[0605] In some embodiments, composition can include a nucleic acid sequence (e.g., mRNA) encoding MPX sequences and at least one universal T-cell epitope.

[0606] In some embodiments, composition can include a nucleic acid sequence (e.g., mRNA) encoding MPX EV surface membrane protein B6R (similar to Vaccinia virus strain Copenhagen B5R), and at least one universal T-cell epitope.

[0607] In some embodiments, composition can include a nucleic acid sequence (e.g., mRNA) encoding MPX MV surface membrane protein MIR (similar to Vaccinia virus strain Copenhagen LIR), and at least one universal T-cell epitope.

[0608] In some embodiments, composition can include a nucleic acid sequence (e.g., mRNA) encoding MPX EV surface membrane protein A35R (similar to Vaccinia virus strain Copenhagen A33R), and at least one universal T-cell epitope.

[0609] In some embodiments, composition can include a nucleic acid sequence (e.g., mRNA) encoding MPX B16R (similar to Vaccinia virus strain Copenhagen B19R), and at least one universal T-cell epitope.

[0610] In some embodiments, composition comprise a nucleic acid sequence (e.g., mRNA) encoding MPX sequences and a nucleic acid sequence (e.g., mRNA) including at least one universal T-cell epitope.

[0611] In some embodiments, composition can include a nucleic acid sequence (e.g., mRNA) encoding MPX EV surface membrane protein B6R (similar to Vaccinia virus strain Copenhagen B5R), and a nucleic acid sequence (e.g., mRNA) including at least one universal T-cell epitope.

[0612] In some embodiments, composition comprise a nucleic acid sequence (e.g., mRNA) encoding MPX MV surface membrane protein MIR (similar to Vaccinia virus strain Copenhagen LIR), and a nucleic acid sequence (e.g., mRNA) including at least one universal T-cell epitope.

[0613] In some embodiments, composition comprise a nucleic acid sequence (e.g., mRNA) encoding MPX EV surface membrane protein A35R (similar to Vaccinia virus strain Copenhagen A33R), and a nucleic acid sequence (e.g., mRNA) including at least one universal T-cell epitope.

[0614] In some embodiments, composition comprise a nucleic acid sequence (e.g., mRNA) encoding MPX B16R (similar to Vaccinia virus strain Copenhagen B19R), and a nucleic acid sequence (e.g., mRNA) including at least one universal T-cell epitope.

[0615] In some embodiments, a MPX antigenic polypeptide is encoded by at least one nucleic acid sequence selected from any of SEQ ID NO: 348 and 350 (Table 1) and homologs having at least 80% identity with a nucleic acid sequence selected from any one of SEQ ID NO: 348 and 350 (Table 1). In some embodiments, MPX antigenic polypeptide is encoded by at least one nucleic acid sequence selected from any one of SEQ ID NO: 348 and 350 (Table 1) and homologs having at least 90% (e.g. 90%, 91%, 92%, 93%, 94%, 95%, 96%, 97%, 98%, 99%, 99.8%, or 99.9%) identity with a nucleic acid sequence selected from any one of SEQ ID NO: 348 and 350 (Table 1). In some embodiments, a MPX antigenic polypeptide is encoded by at least one fragment of a nucleic acid sequence selected from any one of SEQ ID NO: 348 and 350 (Table 1). In some embodiments, the at least one nucleic acid has a chemical modification.

[0616] In some embodiments, the MPX antigenic polypeptide is selected from any of SEQ ID NO: 347 and 349 (Table 1) and homologs having at least 80% identity with a MPX antigenic polypeptide selected from any one of SEQ ID NO: 347 and 349 (Table 1). In some embodiments, MPX antigenic polypeptide selected from any one of SEQ ID NO: 347 and 349 (Table 1) and homologs having at least 90% (e.g. 90%, 91%, 92%, 93%, 94%, 95%, 96%, 97%, 98%, 99%, 99.8%, or 99.9%) identity with a MPX antigenic polypeptide selected from any one of SEQ ID NO: 347 and 349 (Table 1). In some embodiments, a MPX antigenic polypeptide is selected from any one of SEQ ID NO: 347 and 349 (Table 1).

[0617] In some embodiments, the universal T-cell epitope can be identical in other poxviruses such as Cowpox, smallpox and vaccinia viruses.

### Influenza

[0618] In some embodiments, the virus is a strain of Influenza A or Influenza B or combinations thereof. In some embodiments, the strain of Influenza A or Influenza B is associated with birds, pigs, horses, dogs, humans or non-human primates. In some embodiments, the antigenic polypeptide encodes a hemagglutinin protein or fragment thereof. In some embodiments, the hemagglutinin protein is H7 or H10 or a fragment thereof. In some embodiments, the hemagglutinin protein comprises a portion of the head domain (HA1). In some embodiments, the hemagglutinin protein comprises a portion of the cytoplasmic domain. In some embodiments, the truncated hemagglutinin protein. In some embodiments, the protein is a truncated hemagglutinin protein comprises a portion of the transmembrane domain. In some embodiments, the amino acid sequence of the hemagglutinin protein or fragment thereof comprises at least 90%, 91%, 92%, 93%, 94%, 95%, 96%, 97% 98%, or 99% identify with any of the amino acid sequences of SEQ ID NO. 148 or 151. In some embodiments, the virus is selected from the group consisting of H7N9 and H10N8.

[0619] Influenza A virus subtype H7N9 is a form of influenza with a high potential to become pandemic. Over 600 cases of H7N9 influenza have been documented in China to date, with a mortality rate of approximately 1 in 3 people. This may have resulted from sporadic, non-sustained human-to-human transmission. Although several vaccines are in development, immunogenicity has been reportedly low without the addition of adjuvants.

[0620] Influenza A virus subtype H10N8 has also shown a potential to become pandemic, but is at lower risk than influenza A virus subtype H7N9. In 2013, only 3 cases of H10N8 influenza infection were reported in China, resulting in 2 deaths. To date, no vaccine is available.

[0621] In some embodiments the HA7 hemagglutinin antigen is an H7N9 antigen. In other embodiments the RNA polynucleotide comprises a polynucleotide encoding an amino acid sequence having at least 80% sequence identity to SEQ ID NO 148. In other embodiments, the RNA polynucleotide comprises a polynucleotide encoding the amino acid sequence of SEQ ID NO 148. In other embodiments the RNA polynucleotide has at least 80% sequence identity to SEQ ID NO 152, 153, 154, or 156.

[0622] In some embodiments, the HA10 hemagglutinin antigen is an H10N8 antigen. In some embodiments, the RNA polynucleotide comprises a polynucleotide encoding an amino acid sequence having at least 80% sequence identity to SEQ ID NO 151. In some embodiments, the RNA polynucleotide comprises a polynucleotide encoding the amino acid sequence of SEQ ID NO 151. In other embodiments, the RNA polynucleotide has at least 80% sequence identity to SEQ ID NO 149, 150, or 155.

[0623] In some embodiments, the universal T-cell epitope can be identical in other influenza viruses.

### Herpes Simplex Viruses

[0624] The genome of Herpes Simplex Viruses (HSV-1 and HSV-2) contains about 85 open reading frames, such that HSV can generate at least 85 unique proteins. These genes encode 4 major classes of proteins: (1) those associated with the outermost external lipid bilayer of HSV (the envelope), (2) the internal protein coat (the capsid), (3) an intermediate complex connecting the envelope with the capsid coat (the tegument), and (4) proteins responsible for replication and infection.

[0625] Examples of envelope proteins include UL1 (gL), ULIO (gM), UL20, UL22, UL27 (gB), UL43, UL44 (gC), UL45, UL49A, UL53 (gK), US 4 (gG), US 5 (gJ), US 6 (gD), US 7 (gl), US 8 (gE), and US 10. Examples of capsid proteins include UL6, UL18, UL19, UL35, and UL38. Tegument proteins include UL11, UL13, UL21, UL36, UL37, UL41, UL45, UL46, UL47, UL48, UL49, US9, and US 10. Other HSV proteins include UL2, UL3, UL4, UL5, UL7, UL8, UL9, UL12, UL14, UL15, UL16, UL17, UL23, UL24, UL25, UL26, UL26.5, UL28, UL29, UL30, UL31, UL32, UL33, UL34, UL39, UL40, UL42, UL50, UL51, UL52, UL54, UL55, UL56, US 1, US2, US3, US81, US 11, US 12, ICP0, and ICP4.

[0626] Since the envelope (most external portion of an HSV particle) is the first to encounter target cells, the present disclosure encompasses antigenic polypeptides associated with the envelope as immunogenic agents. In brief, surface and membrane proteins—glycoprotein D (gD), glycoprotein B (gB), glycoprotein H (gH), glycoprotein L (gL)—as single antigens or in combination with or without adjuvants may be used as HSV vaccine antigens.

[0627] In some embodiments, composition comprise RNA (e.g., mRNA) encoding HSV (HSV-1 or HSV-2)glycoprotein D.

[0628] In some embodiments, HSV vaccines comprise RNA (e.g., mRNA) encoding HSV (HSV-1 or HSV-2)glycoprotein B.

[0629] In some embodiments, HSV vaccines comprise RNA (e.g., mRNA) encoding HSV (HSV-1 or HSV-2)glycoprotein D and glycoprotein B.

[0630] In some embodiments, HSV vaccines comprise RNA (e.g., mRNA) encoding HSV (HSV-1 or HSV-2)glycoprotein D and glycoprotein C.

[0631] In some embodiments, HSV vaccines comprise RNA (e.g., mRNA) encoding HSV (HSV-1 or HSV-2)glycoprotein D and glycoprotein E (or glycoprotein I).

[0632] In some embodiments, HSV vaccines comprise RNA (e.g., mRNA) encoding HSV (HSV-1 or HSV-2)glycoprotein B and glycoprotein C.

[0633] In some embodiments, HSV vaccines comprise RNA (e.g., mRNA) encoding HSV (HSV-1 or HSV-2)glycoprotein B and glycoprotein E (or glycoprotein I).

[0634] In some embodiments, HSV vaccines comprise RNA (e.g., mRNA) encoding a HSV (HSV-1 or HSV-2) antigenic polypeptide having at least 95%, at least 96%, at least 97%, at least 98% or at least 99% identity with HSV (HSV-1 or HSV-2)glycoprotein D and has HSV (HSV-1 or HSV-2)glycoprotein D activity.

[0635] In some embodiments, HSV vaccines comprise RNA (e.g., mRNA) encoding a HSV (HSV-1 or HSV-2) antigenic polypeptide having at least 95%, at least 96%, at least 97%, at least 98% or at least 99% identity with HSV (HSV-1 or HSV-2)glycoprotein C and has HSV (HSV-1 or HSV-2)glycoprotein C activity.

[0636] In some embodiments, HSV vaccines comprise RNA (e.g., mRNA) encoding a HSV (HSV-1 or HSV-2) antigenic polypeptide having at least 95%, at least 96%, at least 97%, at least 98% or at least 99% identity with HSV (HSV-1 or HSV-2)glycoprotein B and has HSV (HSV-1 or HSV-2)glycoprotein B activity.

[0637] In some embodiments, HSV vaccines comprise RNA (e.g., mRNA) encoding a HSV (HSV-1 or HSV-2) antigenic polypeptide having at least 95%, at least 96%, at least 97%, at least 98% or at least 99% identity with HSV (HSV-1 or HSV-2)glycoprotein E and has HSV (HSV-1 or HSV-2)glycoprotein E activity.

[0638] In some embodiments, HSV vaccines comprise RNA (e.g., mRNA) encoding a HSV (HSV-1 or HSV-2) antigenic polypeptide having at least 95%, at least 96%, at least 97%, at least 98%, or at least 99% identity with HSV (HSV-1 or HSV-2)glycoprotein I and has HSV (HSV-1 or HSV-2)glycoprotein I activity.

[0639] Glycoprotein “activity” of the present disclosure is described below.

[0640] Glycoprotein C (gC) is a glycoprotein involved in viral attachment to host cells; e.g., it acts as an attachment protein that mediates binding of the HSV-2 virus to host adhesion receptors, namely cell surface heparan sulfate and/or chondroitin sulfate. gC plays a role in host immune evasion (aka viral immunoevasion) by inhibiting the host complement cascade activation. In particular, gC binds to and/or interacts with host complement component C3b; this interaction then inhibits the host immune response by dysregulating the complement cascade (e.g., binds host complement C3b to block neutralization of virus). SEQ ID NO: 345 and 346.

[0641] Glycoprotein D (gD) is an envelope glycoprotein that binds to cell surface receptors and/or is involved in cell attachment via polio virus receptor-related protein and/or herpesvirus entry mediator, facilitating virus entry. gD binds to the potential host cell entry receptors (tumor necrosis factor receptor superfamily, member 14 (TNFRSF14)/herpesvirus entry mediator (HVEM), polio virus receptor-related protein 1 (PVRL1) and or poliovirus receptor-related protein 2 (PVRL2), and is proposed to trigger fusion with host membrane by recruiting the fusion machinery composed of, for example, gB and gH/gL. gD interacts with host cell receptors TNFRSF14 and/or PVRL1 and/or PVRL2 and (1) interacts (via profusion domain) with gB; an interaction which can occur in the absence of related HSV glycoproteins, e.g., gH and/or gL; and (2) gD interacts (via profusion domain) with gH/gL heterodimer, an interaction which can occur in the absence of gB. As such, gD associates with the gB-gH/gL-gD complex. gD also interacts (via C-terrrrinus) with UL11 tegument protein. Receptor binding with gD is postulated to be required for inducing fusion via gB and gH/gL. When cysteine residues are introduced at position 190 (K190C) and 277 (A277C) at C-terminus of gD, the disulfide bond is formed, it remains the ability to bind to receptor(s) but cannot trigger fusion (JOURNAL OF VIROLOGY, January 2008, p. 700-709). Thus, these two substitutions can be included in the HSV-2 mRNA vaccine to stabilize the prefusion confirmation of gD. SEQ ID NO: 341 or 342.

[0642] Glycoprotein B (gB) is a viral glycoprotein involved in the viral cell activity of herpes simplex virus (HSV) and is required for the fusion of the HSV's envelope with the cellular membrane. It is the most highly conserved of all surface glycoproteins and primarily acts as a fusion protein, constituting the core fusion machinery. gB, a class III membrane fusion glycoprotein, is a type-1 transmembrane protein trimer of five structural domains. Domain I includes two internal fusion loops and is thought to insert into the cellular membrane during virus-cell fusion. Domain II appears to interact with gH/gL during the fusion process, domain III contains an elongated alpha helix, and domain IV interacts with cellular receptors. The prefusion form of gB presents an attractive target for HSV vaccine development as demonstrated for the class I fusion protein F of RSV and Spike glycoprotein of SARS-COV2, for which the most potent neutralizing antibodies target this conformation only. Previous study (https://www.science.org/doi/10.1126/sciadv.abc1726) with HSV-1 gB has shown that a substitution at position 516, H516P, had no effect on gB expression and posttranslational modifications, but this mutation blocked the transition of gB from pre- to post-fusion state. The H516P substitution can be included in the nucleic acid sequence of the HSV-2 vaccine to elicit neutralizing antibodies more effectively. SEQ ID NO: 341 and 342.

[0643] In epithelial cells, the heterodimer glycoprotein E/glycoprotein I (gE/gl) is required for the cell-to-cell spread of the virus, by sorting nascent virions to cell junctions. Once the virus reaches the cell junctions, virus particles can spread to adjacent cells extremely rapidly through interactions with cellular receptors that accumulate at these junctions. By similarity, it is implicated in basolateral spread in polarized cells. In neuronal cells, gE/gl is essential for the anterograde spread of the infection throughout the host nervous system Together with US 9, the heterodimer gE/gl is involved in the sorting and transport of viral structural components toward axon tips. The heterodimer gE/gl serves as a receptor for the Fc part of host IgG. Dissociation of gE/gl from IgG occurs at acidic pH, thus may be involved in anti-HSV antibodies bipolar bridging, followed by intracellular endocytosis and degradation, thereby interfering with host IgG-mediated immune responses. gE/gl interacts (via C-terrrrinus) with VP22 tegument protein; this interaction is necessary for the recruitment of VP22 to the Golgi and its packaging into virions. SEQ ID NO: 341 and 342.

[0644] In some embodiments, an antigenic polypeptide has at least 95%, at least 96%, at least 97%, at least 98% or at least 99% identity to HSV (HSV-1 or HSV-2)glycoprotein B, HSV (HSV-1 or HSV-2)glycoprotein C, HSV (HSV-1 or HSV-2)glycoprotein D, HSV (HSV-1 or HSV-2)glycoprotein E, HSV (HSV-1 or HSV-2)glycoprotein I, HSV (HSV-1 or HSV-2)glycoprotein H, HSV (HSV-1 or HSV-2)glycoprotein L, or HSV (HSV-1 or HSV-2) ICP4 protein.

[0645] In some embodiments, an antigenic polypeptideis encoded by at least one nucleic acid sequence selected from any of SEQ ID NOs: 157-179, 210-220, 269-272, 340, 342, 344, 346, 604, 606, 608, 610, 612, 614, 616, 618, 620, 622, 624, 626, 628, 630, and 632 homologs having at least 80% identity with a nucleic acid sequence selected from any one of SEQ ID NOs: 157-179, 210-220, 269-272, 340, 342, 344, 346, 604, 606, 608, 610, 612, 614, 616, 618, 620, 622, 624, 626, 628, 630, and 632. In some embodiments, an antigenic polypeptideis encoded by at least one nucleic acid sequence selected from any one of SEQ ID NOs: 157-179, 210-220, 269-272, 340, 342, 344, 346, 604, 606, 608, 610, 612, 614, 616, 618, 620, 622, 624, 626, 628, 630, and 632 and homologs having at least 90% (e.g. 90%, 91%, 92%, 93%, 94%, 95%, 96%, 97%, 98%, 99%, 99.8%, or 99.9%) identity with a nucleic acid sequence selected from any one of SEQ ID NOs: 157-179, 210-220, 269-272, 340, 342, 344, 346, 604, 606, 608, 610, 612, 614, 616, 618, 620, 622, 624, 626, 628, 630, and 632. In some embodiments, an antigenic polypeptideis encoded by at least one fragment of a nucleic acid sequence selected from any one of SEQ ID NOs: 157-179, 210-220, 269-272, 340, 342, 344, 346, 604, 606, 608, 610, 612, 614, 616, 618, 620, 622, 624, 626, 628, 630, and 632. In some embodiments, the at least one nucleic acid has a chemical modification.

[0646] In some embodiments, the composition comprises a nucleic acid sequence (e.g., mRNA) having an open reading frame encoding HSV-2 glycoprotein B (e.g., SEQ ID NOs: 341, 342, 157, 162, 168, 174, 222, 227, or 277).

[0647] In some embodiments, the composition comprises a nucleic acid sequence (e.g., mRNA) having an open reading frame encoding HSV-2 glycoprotein C (e.g., SEQ ID NOs: 158, 163, 169, 175, 223, 228, 278-285, 345, or 346).

[0648] In some embodiments, the composition comprises a nucleic acid sequence (e.g., mRNA) having an open reading frame encoding HSV-2 glycoprotein D (e.g., SEQ ID NOs: 159, 167, 170, 176, 224, 231, 341, or 342).

[0649] In some embodiments, the composition comprises a nucleic acid sequence (e.g., mRNA) having an open reading frame encoding HSV-2 glycoprotein E (e.g., SEQ ID NOs: 160, 164, 171, 177, 225, 229, 345 or 346).

[0650] In some embodiments, the composition comprises a nucleic acid sequence (e.g., mRNA) having an open reading frame encoding HSV-2 glycoprotein I (e.g., SEQ ID NOs: 161, 166, 169, 172, 178, 226, or 230).

[0651] In some embodiments, the composition comprises a nucleic acid sequence (e.g., mRNA) having an open reading frame encoding HSV-2 protein or fragment UL49 (e.g., SEQ ID NOs: 343 or 344). In some embodiments, a HSV vaccine comprises at least one RNA (e.g., mRNA) polynucleotide having an open reading frame encoding HS V-2 ICP4 protein (e.g., SEQ ID NOs: 165, 179, or 233).

[0652] In some embodiments, the composition comprises a nucleic acid sequence (e.g., mRNA) having an open reading frame encoding HSV-2 ICPO protein (e.g., SEQ ID NOs: 173 or 232).

[0653] In some embodiments, a HSV vaccine comprises at least one RNA (e.g., mRNA) polynucleotide having an open reading frame encoding HS V-2 ICPO protein or fragment (e.g., SEQ ID NOs: 343 or 344).

[0654] In some embodiments, the composition comprises a nucleic acid sequence (e.g., mRNA) having an open reading frame encoding HSV-2 UL19 protein (e.g., SEQ ID NOs: 343).

[0655] In some embodiments, the composition comprises a nucleic acid sequence (e.g. mRNA) encoding the whole genome of HSV-2 SEQ ID NO: 343 in the Table 1, which contains at least one universal T-cell epitope conserved between HSV-2 and HSV-1 SEQ ID NOs: 452-539, and 649 (Table 3). In some embodiments, the composition comprises a nucleic acid sequence (e.g. mRNA) that comprises a nucleic acid selected from any one of SEQ ID NOs: 234-268, 273-276, or 286-289. In some embodiments, the composition comprises a nucleic acid sequence (e.g. mRNA) that comprises a nucleic acid selected from any one of SEQ ID NOs: 340, 342, 344, 346, 604, 606, 608, 610, 612, 614, 616, 618, 620, 622, 624, 626, 628, 630, and 632.

[0656] In some embodiments, a nucleic acid sequence encoding an infection agent antigenic polypeptide having greater than 90% (e.g. 90%, 91%, 92%, 93%, 94%, 95%, 96%, 97%, 98%, 99%, 99.8%, or 99.9%) identity to an amino acid sequence of any one of SEQ ID NOs: 180-209, 222-233, 277-281, or 339, 341, 343, 345, 603, 605, 607, 609, 611, 613, 614, 617, 619, 621, 623, 625, 627, 629, 631.

[0657] A HSV vaccine may include, for example, at least one nucleic acid sequence (e.g., mRNA) having an open reading frame encoding at least one HSV antigenic polypeptide identified by any one of SEQ ID NOs: 157-179, 210-220, 269-272, 340, 342, 344, 346, 604, 606, 608, 610, 612, 614, 616, 618, 620, 622, 624, 626, 628, 630, and 632 and a nucleic acid sequence (e.g., mRNA) encoding at least one universal T-cell epitope identified by any one of SEQ ID NOs: 542-539, and 649 (Table 3), all the T cell epitopes in the mRNA are listed.

[0658] A HSV vaccine may comprise, for example, at least one nucleic acid sequence (e.g., mRNA) having an open reading frame encoding at least one HSV antigenic polypeptide identified by any one of SEQ ID NOs: 157-179, 210-220, 269-272, 340, 342, 344, 346, 604, 606, 608, 610, 612, 614, 616, 618, 620, 622, 624, 626, 628, 630, and 632 and at least one universal T-cell epitope identified by any one of SEQ ID NOs: 452-539, and 649 (Table 3).

[0659] In some embodiments, a HSV antigenic polypeptide is encoded by at least one nucleic acid sequence selected from any of SEQ ID NOs: 340, 342, 344, 346, 604, 606, 608, 610, 612, 614, 616, 618, 620, 622, 624, 626, 628, 630, and 632 (Table 1) and homologs having at least 80% identity with a nucleic acid sequence selected from any one of SEQ ID NOs: 340, 342, 344, 346, 604, 606, 608, 610, 612, 614, 616, 618, 620, 622, 624, 626, 628, 630, and 632 (Table 1). In some embodiments, a HSV antigenic polypeptide is encoded by at least one nucleic acid sequence selected from any one of SEQ ID Nos: 340, 342, 344, 346, 604, 606, 608, 610, 612, 614, 616, 618, 620, 622, 624, 626, 628, 630, and 632 (Table 1) and homologs having at least 90% (e.g. 90%, 91%, 92%, 93%, 94%, 95%, 96%, 97%, 98%, 99%, 99.8%, or 99.9%) identity with a nucleic acid sequence selected from any one of SEQ ID NO: 340, 342, 344, 346, 604, 606, 608, 610, 612, 614, 616, 618, 620, 622, 624, 626, 628, 630, and 632 (Table 1). In some embodiments, a HSV antigenic polypeptide is encoded by at least one fragment of a nucleic acid sequence selected from any one of SEQ ID NO: 340, 342, 344, 346, 604, 606, 608, 610, 612, 614, 616, 618, 620, 622, 624, 626, 628, 630, and 632 (Table 1). In some embodiments, the at least one nucleic acid has a chemical modification.

[0660] In some embodiments, the HSV antigenic polypeptide is selected from any of SEQ ID NO: 339, 341, 343, 345 603, 605, 607, 609, 611, 613, 614, 617, 619, 621, 623, 625, 627, 629, and 631 (Table 1) and homologs having at least 80% identity with a HSV antigenic polypeptide selected from any one of SEQ ID NO: 339, 341, 343, 345 603, 605, 607, 609, 611, 613, 614, 617, 619, 621, 623, 625, 627, 629, and 631 (Table 1). In some embodiments, HSV antigenic polypeptide selected from any one of SEQ ID NO: 339, 341, 343, 345 603, 605, 607, 609, 611, 613, 614, 617, 619, 621, 623, 625, 627, 629, and 631 (Table 1) and homologs having at least 90% (e.g. 90%, 91%, 92%, 93%, 94%, 95%, 96%, 97%, 98%, 99%, 99.8%, or 99.9%) identity with a HSV antigenic polypeptide selected from any one of SEQ ID NOs: 339, 341, 343, 345 603, 605, 607, 609, 611, 613, 614, 617, 619, 621, 623, 625, 627, 629, and 631 (Table 1). In some embodiments, a HSV antigenic polypeptide is selected from any one of SEQ ID NOs: 339, 341, 343, 345 603, 605, 607, 609, 611, 613, 614, 617, 619, 621, 623, 625, 627, 629, and 631 (Table 1).

### Varicella Zoster Virus (VZV)

[0661] VZV is an alphaherpesvirus that exists as a spherical multilayered structure approximately 200 nm in diameter. The viral genome is surrounded by a protein capsid structure that is covered by an amorphous layer of tegument proteins. These two structures are surrounded by a lipid envelope that is studded with viral glycoproteins, each about 8 nm in length, that are displayed on the exterior of the-virion, and encloses the 100 nm nucleocapsid which is comprised of 162 hexameric and pentameric capsomeres arranged in an icosahedral form. The tegument, which is comprised of virally-encoded proteins and enzymes, is located in the space between the nucleocapsid and the viral envelope. The viral envelope is acquired from host cell membranes and contains viral-encoded glycoproteins.

[0662] The VZV genome is a single, linear, duplex DNA molecule of 124,884 base pairs having at least 70 open reading frames. The genome has 2 predominant isomers, depending on the orientation of the S segment, P (prototype) and IS (inverted S), which are present with equal frequency for a total frequency of 90-95%. The L segment can also be inverted resulting in a total of four linear isomers (IL and ILS).

[0663] VZV is closely related to the herpes simplex viruses (HSV), sharing much genome homology. The VZV genome is the smallest of the human herpesviruses and encodes at least 71 unique proteins (ORFO-ORF68) with three more opening reading frames (ORF69-ORF71) that duplicate earlier open reading frames (ORF64-62, respectively). Only a fraction of the encoded proteins form the structure of the virus particle. Among those proteins are nine glycoproteins: ORFS (gK), ORF9A (gN), ORF14 (gC), ORF31 (gB), ORF37 (gH), ORF50 (gM), ORF60 (gL), ORF67 (gI), and ORF68 (gE). The known envelope glycoproteins (gB, gC, gE, gH, gl, gK, gL, gN, and gM) correspond with those in HSV; however, there is no equivalent of HSV gD. VZV also fails to produce the LAT (latency-associated transcripts) that play an important role in establishing HSV latency (herpes simplex virus). The encoded glycoproteins gE, gl, gB, gH, gK, gL, gC, gN, and gM function in different steps of the viral replication cycle. The most abundant glycoprotein found in infected cells. as well as in the mature virion, is glycoprotein E (gE, ORF 68), which is a major component of the virion envelope and is essential for viral replication. Glycoprotein I (gI, ORG 67) forms a complex with gE in infected cells, which facilitates the endocytosis of both glycoproteins and directs them to the trans-Golgi network (TGN) where the final viral envelope is acquired. Glycoprotein I (gI) is required within the TGN for VZV envelopment and for efficient membrane fusion during VZV replication. VZV gE and gl are found complexed together on the infected host cell surface. Glycoprotein B (ORF 31), which is the second most prevalent glycoprotein and thought to play a role in virus entry, binds to neutralizing antibodies. Glycoprotein H is thought to have a fusion function facilitating cell to cell spread of the virus. Antibodies to gE, gB, and gH are prevalent after natural infection and following vaccination and have been shown to neutralize viral activity in vitro.

[0664] In some embodiments, an antigenic polypeptide is a VZV glycoprotein. For example, a VZV glycoprotein may be VZV gE, gl, gB, gH, gK, gL, gC, gN, or gM. In some embodiments, the antigenic polypeptide is a VZV gE polypeptide. In some embodiments, the antigenic polypeptide is a VZV gl polypeptide. In some embodiments, the antigenic polypeptide is a VZV gB polypeptide. In some embodiments, the antigenic polypeptide is a VZV gH polypeptide. In some embodiments, the antigenic polypeptide is a VZV gK polypeptide. In some embodiments, the antigenic polypeptide is a VZV gL polypeptide. In some embodiments, the antigenic polypeptide is a VZV gC polypeptide. In some embodiments, the antigenic polypeptide is a VZV gN polypeptide. In some embodiments, the antigenic polypeptide is a VZV gM polypeptide.

[0665] In some embodiments, an antigenic polypeptide is a VZV glycoprotein. For example, a VZV glycoprotein may be VZV gE, gl, gB, gH, gK, gL, gC, gN, or gM. In some embodiments, the antigenic polypeptide is a VZV gE polypeptide. In some embodiments, the antigenic polypeptide is a VZV gl polypeptide. In some embodiments, the antigenic polypeptide is a VZV gB polypeptide. In some embodiments, the antigenic polypeptide is a VZV gH polypeptide. In some embodiments, the antigenic polypeptide is a VZV gK polypeptide. In some embodiments, the antigenic polypeptide is a VZV gL polypeptide. In some embodiments, the antigenic polypeptide is a VZV gC polypeptide. In some embodiments, the antigenic polypeptide is a VZV gN polypeptide. In some embodiments, the antigenic polypeptide is a VZV gM polypeptide. In some embodiments, the VZV glycoprotein is encoded by a nucleic acid sequence of SEQ ID NO: 290 or SEQ ID NO: 291.

[0666] In some embodiments, the VZV glycoprotein is a variant gE polypeptide. In some embodiments, the variant VZV gE polypeptide is a truncated polypeptide lacking the anchor domain (ER retention domain). In some embodiments, the truncated VZV gE polypeptide comprises (or consists of, or consists essentially of) amino acids 1-561 of VZV gE polypeptide. In some embodiments, the truncated VZV gE polypeptide comprises (or consists of, or consists essentially of) amino acids 1-561 of SEQ ID NO: 298. In some embodiments, the truncated VZV gE polypeptide comprises (or consists of, or consists essentially of) amino acids 1-573 of SEQ ID NO: 300. In some embodiments, the truncated VZV gE polypeptide comprises (or consists of, or consists essentially of) amino acids 1-573 of SEQ ID NO: 298. In some embodiments, the variant VZV gE polypeptide is a truncated polypeptide lacking the carboxy terminal tail domain. In some embodiments, the truncated VZV gE polypeptide comprises (or consists of, or consists essentially of) amino acids 1-573 of VZV gE polypeptide. In some embodiments, the truncated VZV gE polypeptide comprises (or consists of, or consists essentially of) amino acids 1-573 of SEQ ID NO: 304.

[0667] In some embodiments, the variant VZV gE polypeptide has at least one mutation in one or more motif(s) associated with ER retention, wherein the mutation(s) in one or more motif(s) results in decreased retention of the VZV gE polypeptide in the ER and/or golgi. In some embodiments, the variant VZV gE polypeptide has at least one mutation in one or more motif(s) associated with targeting gE to the golgi or trans-golgi network (TGN), wherein the mutation(s) in one or more motif(s) results in decreased targeting or localization of the VZV gE polypeptide to the golgi or TGN. In some embodiments, the variant VZV gE polypeptide has at least one mutation in one or more motif(s) associated with the internalization of VZV gE or the endocytosis of gE, wherein the mutation(s) in one or more motif(s) results in decreased endocytosis of the VZV gE polypeptide. In some embodiments, the variant VZV gE polypeptide has at least one mutation in one or more phosphorylated acidic motif(s), such as SSTT (SEQ ID NO: 320). In some embodiments, the variant VZV gE polypeptide is a full-length VZV gE polypeptide having a Y582G mutation. In some embodiments, the variant VZV gE polypeptide is a full-length VZV gE polypeptide having a Y569A mutation. In some embodiments, the variant VZV gE polypeptide is a full-length VZV gE polypeptide having a Y582G mutation and a Y569A mutation. In some embodiments, the variant VZV gE polypeptide is an antigenic fragment comprising amino acids 1-573 of VZV gE and having a Y569A mutation. In some embodiments, the variant VZV gE polypeptide is an antigenic fragment comprising SEQ ID NO: 305.

[0668] In some embodiments, the variant VZV gE polypeptide is SEQ ID NO: 299. In some embodiments, the variant VZV gE polypeptide is SEQ ID NO: 302. In some embodiments, the variant VZV gE polypeptide is or comprises the amino acid sequence of SEQ ID NO: 303.

[0669] In some embodiments, the variant VZV gE polypeptide is a full-length VZV gE polypeptide having an additional sequence at the C-terminus that aids in secretion of the polypeptide or its localization to the cell membrane. In some embodiments, the variant VZV gE polypeptide is a full-length VZV gE polypeptide having an IgKappa sequence at the C-terminus. In some embodiments, the VZV gE polypeptide has additional sequence at the C-terminus that aids in secretion (e.g., has an IgKappa sequence at the C-terminus) and has at least one mutation in one or more motif(s) associated with ER retention, TGN localization, or endocytosis (e.g., has a Y582G mutation, a Y569A mutation, or both a Y582G mutation and a Y569A mutation) and/or has at least one mutation in one or more phosphorylated acidic motif(s), such as the SSTT (SEQ ID NO: 320) motif. In some embodiments, the variant VZV gE polypeptide is a truncated polypeptide lacking the anchor domain (ER retention domain) and having an additional sequence at the C-terminus that aids in secretion of the polypeptide (e.g., an IgKappa sequence at the C-terminus). In some embodiments, the truncated VZV gE polypeptide comprises amino acids 1-561 and has an IgKappa sequence at the C-terminus. In some embodiments, the variant polypeptide is SEQ ID NO: 301.

[0670] In some embodiments, at least one RNA polynucleotide is encoded by at least one nucleic acid sequence selected from SEQ ID NO: 290, SEQ ID NO: 291, SEQ ID NO: 292, SEQ ID NO: 293, SEQ ID NO: 294, SEQ ID NO: 295, SEQ ID NO: 296, SEQ ID NO: 297, SEQ ID NO: 306 and homologs having at least 80% (e.g., 85%, 90%, 95%, 98%, 99%) identity with a nucleic acid sequence selected from SEQ ID NO: 290-297 and 306. In some embodiments, at least one RNA polynucleotide is encoded by at least one nucleic acid sequence selected from SEQ ID NO: 290, SEQ ID NO: 291, SEQ ID NO: 292, SEQ ID NO: 293, SEQ ID NO: 294, SEQ ID NO: 295, SEQ ID NO: 296, SEQ ID NO: 297, SEQ ID NO: 306 and homologs having at least 90% (e.g., 90%, 91%, 92%, 93%, 94%, 95%, 96%, 97%, 98%, 99%, 99.8% or 99.9%) identity with a nucleic acid sequence selected from SEQ ID NO: 1-8 and 41. In some embodiments, at least one RNA polynucleotide is encoded by at least one fragment of a nucleic acid sequence (e.g., a fragment having an antigenic sequence or at least one epitope) selected from SEQ ID NO: 290, SEQ ID NO: 291, SEQ ID NO: 292, SEQ ID NO: 293, SEQ ID NO: 294, SEQ ID NO: 295, SEQ ID NO: 296, SEQ ID NO: 297, SEQ ID NO: 306 and homologs having at least 80% (e.g., 85%, 90%, 95%, 98%, 99%) identity with a nucleic acid sequence selected from SEQ ID NO: 290-297 and 306. In some embodiments, at least one RNA polynucleotide is encoded by at least one epitope of a nucleic acid sequence selected from SEQ ID NO: 290, SEQ ID NO: 291, SEQ ID NO: 292, SEQ ID NO: 293, SEQ ID NO: 294, SEQ ID NO: 295, SEQ ID NO: 296, SEQ ID NO: 297, SEQ ID NO: 306.

[0671] In some embodiments, at least one RNA polynucleotide is a gE polypeptide encoded by SEQ ID NO: 290. In some embodiments, at least one RNA polynucleotide is a gl polypeptide encoded by SEQ ID NO: 291. In some embodiments, at least one RNA polynucleotide is a truncated gE polypeptide encoded by SEQ ID NO: 292. In some embodiments, at least one RNA polynucleotide is a truncated gE polypeptide encoded by SEQ ID NO: 294. In some embodiments, at least one RNA polynucleotide is a truncated gE polypeptide having Y569A mutation encoded by SEQ ID NO: 295. In some embodiments, at least one RNA polynucleotide is a gE polypeptide having an AEAADA sequence SEQ ID NO: 319 encoded by SEQ ID NO: 296. In some embodiments, at least one RNA polynucleotide is a gE polypeptide having a Y582G mutation and a AEAADA sequence (SEQ ID NO: 319) encoded by SEQ ID NO: 297. In some embodiments, at least one RNA polynucleotide is a gE polypeptide encoded by SEQ ID NO: 306.

[0672] In some embodiments, at least one RNA (e.g., mRNA) polynucleotide encodes an antigenic polypeptide having at least 90% identity to the amino acid sequence of any one of SEQ ID NO: 298, 299, 300, 301, 302, 303, 304, 305, 307 and 308-318. In some embodiments, at least one RNA (e.g., mRNA) polynucleotide encodes an antigenic polypeptide having at least 95% identity to the amino acid sequence of any one of SEQ ID NO: 298, 299, 300, 301, 302, 303, 304, 305, 307 and 308-318. In some embodiments, at least one RNA polynucleotide encodes an antigenic polypeptide having at least 96% identity to the amino acid sequence of any one of SEQ ID NO: 298, 299, 300, 301, 302, 303, 304, 305, 307 and 308-318. In some embodiments, at least one RNA (e.g., mRNA) polynucleotide encodes an antigenic polypeptide having at least 97% identity to the amino acid sequence of any one of SEQ ID NO: 298, 299, 300, 301, 302, 303, 304, 305, 307 and 308-318. In some embodiments, at least one RNA (e.g., mRNA) polynucleotide encodes an antigenic polypeptide having at least 98% identity to the amino acid sequence of any one of SEQ ID NO: 298, 299, 300, 301, 302, 303, 304, 305, 307 and 308-318. In some embodiments, at least one RNA (e.g., mRNA) polynucleotide encodes an antigenic polypeptide having at least 99% identity to the amino acid sequence of any one of SEQ ID NO: 298, 299, 300, 301, 302, 303, 304, 305, 307 and 308-318.

[0673] In some embodiments, the open reading frame from which the VZV polypeptide is encoded is codon-optimized.

[0674] In some embodiments, the at least one RNA (e.g., mRNA) polynucleotide encodes an antigenic protein of SEQ ID NO: 298, wherein the RNA (e.g., mRNA) polynucleotide has less than 80% identity to wild-type mRNA sequence. In some embodiments, the at least one RNA polynucleotide encodes an antigenic protein of SEQ ID NO: 298, wherein the RNA (e.g., mRNA) polynucleotide has greater than 80% identity to wild-type mRNA sequence, but does not include wild-type mRNA sequence. In some embodiments, the at least one RNA (e.g., mRNA) polynucleotide encodes an antigenic protein of SEQ ID NO: 307, wherein the RNA e.g., mRNA) polynucleotide has less than 80% identity to wild-type mRNA sequence. In some embodiments, the at least one RNA (e.g., mRNA) polynucleotide encodes an antigenic protein of SEQ ID NO: 307, wherein the RNA polynucleotide has greater than 80% identity to wild-type mRNA sequence, but does not include wild-type mRNA sequence. In some embodiments, the at least one RNA (e.g., mRNA) polynucleotide encodes an antigenic protein of SEQ ID NO: 299, wherein the RNA (e.g., mRNA) polynucleotide has less than 80% identity to wild-type mRNA sequence. In some embodiments, the at least one RNA (e.g., mRNA) polynucleotide encodes an antigenic protein of SEQ ID NO: 299, wherein the RNA (e.g., mRNA) polynucleotide has greater than 80% identity to wild-type mRNA sequence, but does not include wild-type mRNA sequence. In some embodiments, the at least one RNA (e.g., mRNA) polynucleotide encodes an antigenic protein of SEQ ID NO: 302, wherein the RNA polynucleotide has less than 80% identity to wild-type mRNA sequence. In some embodiments, the at least one RNA (e.g., mRNA) polynucleotide encodes an antigenic protein of SEQ ID NO: 302, wherein the RNA (e.g., mRNA) polynucleotide has greater than 80% identity to wild-type mRNA sequence, but does not include wild-type mRNA sequence. In some embodiments, the at least one RNA (e.g., mRNA) polynucleotide encodes an antigenic protein of SEQ ID NO: 303, wherein the RNA polynucleotide has less than 80% identity to wild-type mRNA sequence. In some embodiments, the at least one RNA polynucleotide encodes an antigenic protein of SEQ ID NO: 303, wherein the RNA (e.g., mRNA) polynucleotide has greater than 80% identity to wild-type mRNA sequence, but does not include wild-type mRNA sequence. In some embodiments, the at least one RNA (e.g., mRNA) polynucleotide is encoded by a sequence selected from any one of SEQ ID NO: 290-297 and SEQ ID NO 306 and includes at least one chemical modification.

[0675] In some embodiments, the nucleic acids disclosed herein can include at least one chemically modified nucleotide. In some embodiments, the at least one chemically modified nucleotide comprises a chemically modified nucleobase, a chemically modified ribose, a chemically modified phosphodiester linkage, or a combination thereof.

[0676] In one embodiment, the at least one chemically modified nucleotide is a chemically modified nucleobase.

[0677] In one embodiment, the chemically modified nucleobase is selected from 5-formylcytidine (5fC), 5-methylcytidine (5meC), 5-methoxycytidine (5moC), 5-hydroxycytidine (5hoC), 5-hydroxymethylcytidine (5hmC), 5-formyluridine (5fU), 5-methyluridine (5-meU), 5-methoxyuridine (5moU), 5-carboxymethylesteruridine (5camU), pseudouridine (Ψ), N1-methylpseudouridine (me¹Ψ), N⁶-methyladenosine (me⁶A), or thienoguanosine (^{th}G).

[0678] In some embodiments, the chemically modified nucleobase is 5-methoxyuridine (5moU). In some embodiments, the chemically modified nucleobase is pseudouridine (Ψ). In some embodiments, the chemically modified nucleobase is N1-methylpseudouridine (me¹Ψ).

[0679] The structures of these modified nucleobases are shown below:

[chemical structure]

[chemical structure]

[0680] In one embodiment, the at least one chemically modified nucleotide is a chemically modified ribose.

[0681] In one embodiment, the chemically modified ribose is selected from 2′-O-methyl(2′-O-Me), 2′-Fluoro (2′-F), 2′-deoxy-2′-fluoro-beta-D-arabino-nucleic acid (2′F-ANA), 4′-S, 4′-SFANA, 2′-azido, UNA, 2′-O-methoxy-ethyl(2′-O-ME), 2′-O-Allyl, 2′-O-Ethylamine, 2′-O-Cyanoethyl, Locked nucleic acid (LAN), Methylene-cLAN, N-MeO-amino BNA, or N-MeO-aminooxy BNA. In one embodiment, the chemically modified ribose is 2′-O-methyl(2′-O-Me). In one embodiment, the chemically modified ribose is 2′-Fluoro (2′-F).

[0682] The structures of these modified riboses are shown below:

[chemical structure]

[chemical structure]

[chemical structure]

[chemical structure]

[0683] In one embodiment, the at least one chemically modified nucleotide is a chemically modified phosphodiester linkage.

[0684] In one embodiment, the chemically modified phosphodiester linkage is selected from phosphorothioate (PS), boranophosphate, phosphodithioate (PS2), 3′,5′-amide, N3′-phosphoramidate (NP), Phosphodiester (PO), or 2′,5′-phosphodiester (2′,5′-PO). In one embodiment, the chemically modified phosphodiester linkage is phosphorothioate.

[0685] The structures of these modified phosphodiester linkages are shown below:

[chemical structure]

[chemical structure]

[0686] In some embodiments, the mRNA can include a heterologous 5′ untranslated region (5′UTR). In some embodiments, the mRNA can include a heterologous 3′ untranslated region (3′UTR).

### Methods of Administration

[0687] The compositions as used in the methods described herein can be administered by any suitable method and technique presently or prospectively known to those skilled in the art. For example, the active components described herein can be formulated in a physiologically- or pharmaceutically-acceptable form and administered by any suitable route known in the art including, for example, oral and parenteral routes of administering. As used herein, the term “parenteral” includes subcutaneous, intradermal, intravenous, intramuscular, intraperitoneal, and intrasternal administration, such as by injection. Administration of the active components of their compositions can be a single administration, or at continuous and distinct intervals as can be readily determined by a person skilled in the art.

[0688] “Excipients” include any and all solvents, diluents or other liquid vehicles, dispersion or suspension aids, surface active agents, isotonic agents, thickening or emulsifying agents, preservatives, solid binders, lubricants and the like, as suited to the particular dosage form desired. General considerations in formulation and/or manufacture can be found, for example, in Remington's Pharmaceutical Sciences, Sixteenth Edition, E. W. Martin (Mack Publishing Co., Easton, Pa., 1980), and Remington: The Science and Practice of Pharmacy, 21st Edition (Lippincott Williams & Wilkins, 2005).

[0689] Exemplary excipients include, but are not limited to, any non-toxic, inert solid, semisolid or liquid filler, diluent, encapsulating material or formulation auxiliary of any type. Some examples of materials which can serve as excipients include, but are not limited to, sugars such as lactose, glucose, and sucrose; starches such as corn starch and potato starch; cellulose and its derivatives such as sodium carboxymethyl cellulose, ethyl cellulose, and cellulose acetate; powdered tragacanth; malt; gelatin; talc; excipients such as cocoa butter and suppository waxes; oils such as peanut oil, cottonseed oil; safflower oil; sesame oil; olive oil; corn oil and soybean oil; glycols such as propylene glycol; esters such as ethyl oleate and ethyl laurate; agar; detergents such as Tween 80; buffering agents such as magnesium hydroxide and aluminum hydroxide; alginic acid; pyrogen-free water; isotonic saline; Ringer's solution; ethyl alcohol; and phosphate buffer solutions, as well as other non-toxic compatible lubricants such as sodium lauryl sulfate and magnesium stearate, as well as coloring agents, releasing agents, coating agents, sweetening, flavoring and perfuming agents, preservatives and antioxidants can also be present in the composition, according to the judgment of the formulator. As would be appreciated by one of skill in this art, the excipients may be chosen based on what the composition is useful for. For example, with a pharmaceutical composition, the choice of the excipient will depend on the route of administration, the agent being delivered, time course of delivery of the agent, etc., and can be administered to humans and/or to animals, orally, rectally, parenterally, intracisternally, intravaginally, intranasally, intraperitoneally, topically (as by powders, creams, ointments, or drops), buccally, or as an oral or nasal spray. In some embodiments, the active compounds disclosed herein are administered topically.

[0690] Exemplary diluents include calcium carbonate, sodium carbonate, calcium phosphate, dicalcium phosphate, calcium sulfate, calcium hydrogen phosphate, sodium phosphate lactose, sucrose, cellulose, microcrystalline cellulose, kaolin, mannitol, sorbitol, inositol, sodium chloride, dry starch, cornstarch, powdered sugar, etc., and combinations thereof.

[0691] Exemplary granulating and/or dispersing agents include potato starch, corn starch, tapioca starch, sodium starch glycolate, clays, alginic acid, guar gum, citrus pulp, agar, bentonite, cellulose and wood products, natural sponge, cation-exchange resins, calcium carbonate, silicates, sodium carbonate, cross-linked poly(vinyl-pyrrolidone) (crospovidone), sodium carboxymethyl starch (sodium starch glycolate), carboxymethyl cellulose, cross-linked sodium carboxymethyl cellulose (croscarmellose), methylcellulose, pregelatinized starch (starch 1500), microcrystalline starch, water insoluble starch, calcium carboxymethyl cellulose, magnesium aluminum silicate (Veegum), sodium lauryl sulfate, quaternary ammonium compounds, etc., and combinations thereof.

[0692] Exemplary surface active agents and/or emulsifiers include natural emulsifiers (e.g. acacia, agar, alginic acid, sodium alginate, tragacanth, chondrux, cholesterol, xanthan, pectin, gelatin, egg yolk, casein, wool fat, cholesterol, wax, and lecithin), colloidal clays (e.g. bentonite [aluminum silicate] and Veegum [magnesium aluminum silicate]), long chain amino acid derivatives, high molecular weight alcohols (e.g. stearyl alcohol, cetyl alcohol, oleyl alcohol, triacetin monostearate, ethylene glycol distearate, glyceryl monostearate, and propylene glycol monostearate, polyvinyl alcohol), carbomers (e.g. carboxy polymethylene, polyacrylic acid, acrylic acid polymer, and carboxy vinyl polymer), carrageenan, cellulosic derivatives (e.g. carboxymethylcellulose sodium, powdered cellulose, hydroxymethyl cellulose, hydroxypropyl cellulose, hydroxypropyl methylcellulose, methylcellulose), sorbitan fatty acid esters (e.g. polyoxyethylene sorbitan monolaurate [Tween 20], polyoxyethylene sorbitan [Tween 60], polyoxyethylene sorbitan monooleate [Tween 80], sorbitan monopalmitate [Span 40], sorbitan monostearate [Span 60], sorbitan tristearate [Span 65], glyceryl monooleate, sorbitan monooleate [Span 80]), polyoxyethylene esters (e.g. polyoxyethylene monostearate | Myrj 45|, polyoxyethylene hydrogenated castor oil, polyethoxylated castor oil, polyoxymethylene stearate, and Solutol), sucrose fatty acid esters, polyethylene glycol fatty acid esters (e.g. Cremophor), polyoxyethylene ethers, (e.g. polyoxyethylene lauryl ether [Brij 30]), poly(vinyl-pyrrolidone), diethylene glycol monolaurate, triethanolamine oleate, sodium oleate, potassium oleate, ethyl oleate, oleic acid, ethyl laurate, sodium lauryl sulfate, Pluronic F 68, Poloxamer 188, cetrimonium bromide, cetylpyridinium chloride, benzalkonium chloride, docusate sodium, etc. and/or combinations thereof. Exemplary binding agents include starch (e.g. cornstarch and starch paste), gelatin, sugars (e.g. sucrose, glucose, dextrose, dextrin, molasses, lactose, lactitol, mannitol, etc.), natural and synthetic gums (e.g. acacia, sodium alginate, extract of Irish moss, panwar gum, ghatti gum, mucilage of isapol husks, carboxymethylcellulose, methylcellulose, ethylcellulose, hydroxyethylcellulose, hydroxypropyl cellulose, hydroxypropyl methylcellulose, microcrystalline cellulose, cellulose acetate, poly(vinyl-pyrrolidone), magnesium aluminum silicate (Veegum), and larch arabogalactan), alginates, polyethylene oxide, polyethylene glycol, inorganic calcium salts, silicic acid, polymethacrylates, waxes, water, alcohol, etc., and/or combinations thereof.

[0693] Exemplary preservatives include antioxidants, chelating agents, antimicrobial preservatives, antifungal preservatives, alcohol preservatives, acidic preservatives, and other preservatives.

[0694] Exemplary antioxidants include alpha tocopherol, ascorbic acid, ascorbyl palmitate, butylated hydroxyanisole, butylated hydroxytoluene, monothioglycerol, potassium metabisulfite, propionic acid, propyl gallate, sodium ascorbate, sodium bisulfite, sodium metabisulfite, and sodium sulfite.

[0695] Exemplary chelating agents include ethylenediaminetetraacetic acid (EDTA) and salts and hydrates thereof (e.g., sodium edetate, disodium edetate, trisodium edetate, calcium disodium edetate, dipotassium edetate, and the like), citric acid and salts and hydrates thereof (e.g., citric acid monohydrate), fumaric acid and salts and hydrates thereof, malic acid and salts and hydrates thereof, phosphoric acid and salts and hydrates thereof, and tartaric acid and salts and hydrates thereof. Exemplary antimicrobial preservatives include benzalkonium chloride, benzethonium chloride, benzyl alcohol, bronopol, cetrimide, cetylpyridinium chloride, chlorhexidine, chlorobutanol, chlorocresol, chloroxylenol, cresol, ethyl alcohol, glycerin, hexetidine, imidurea, phenol, phenoxyethanol, phenylethyl alcohol, phenylmercuric nitrate, propylene glycol, and thimerosal.

[0696] Exemplary antifungal preservatives include butyl paraben, methyl paraben, ethyl paraben, propyl paraben, benzoic acid, hydroxybenzoic acid, potassium benzoate, potassium sorbate, sodium benzoate, sodium propionate, and sorbic acid.

[0697] Exemplary alcohol preservatives include ethanol, polyethylene glycol, phenol, phenolic compounds, bisphenol, chlorobutanol, hydroxybenzoate, and phenylethyl alcohol.

[0698] Exemplary acidic preservatives include vitamin A, vitamin C, vitamin E, beta-carotene, citric acid, acetic acid, dehydroacetic acid, ascorbic acid, sorbic acid, and phytic acid. Other preservatives include tocopherol, tocopherol acetate, deteroxime mesylate, cetrimide, butylated hydroxyanisol (BHA), butylated hydroxytoluene (BHT), ethylenediamine, sodium lauryl sulfate (SLS), sodium lauryl ether sulfate (SLES), sodium bisulfite, sodium metabisulfite, potassium sulfite, potassium metabisulfite, Glydant Plus. Phenonip, methylparaben. Germall 115, Germaben II, Neolone, Kathon, and Euxyl. In certain embodiments, the preservative is an anti-oxidant. In other embodiments, the preservative is a chelating agent.

[0699] Exemplary buffering agents include citrate buffer solutions, acetate buffer solutions, phosphate buffer solutions, ammonium chloride, calcium carbonate, calcium chloride, calcium citrate, calcium glubionate, calcium gluceptate, calcium gluconate, D-gluconic acid, calcium glycerophosphate, calcium lactate, propanoic acid, calcium levulinate, pentanoic acid, dibasic calcium phosphate, phosphoric acid, tribasic calcium phosphate, calcium hydroxide phosphate, potassium acetate, potassium chloride, potassium gluconate, potassium mixtures, dibasic potassium phosphate, monobasic potassium phosphate, potassium phosphate mixtures, sodium acetate, sodium bicarbonate, sodium chloride, sodium citrate, sodium lactate, dibasic sodium phosphate, monobasic sodium phosphate, sodium phosphate mixtures, tromethamine, magnesium hydroxide, aluminum hydroxide, alginic acid, pyrogen-free water, isotonic saline, Ringer's solution, ethyl alcohol, etc., and combinations thereof.

[0700] Exemplary lubricating agents include magnesium stearate, calcium stearate, stearic acid, silica, talc, malt, glyceryl behanate, hydrogenated vegetable oils, polyethylene glycol, sodium benzoate, sodium acetate, sodium chloride, leucine, magnesium lauryl sulfate, sodium lauryl sulfate, etc., and combinations thereof.

[0701] Exemplary natural oils include almond, apricot kernel, avocado, babassu, bergamot, black current seed, borage, cade, chamomile, canola, caraway, carnauba, castor, cinnamon, cocoa butter, coconut, cod liver, coffee, corn, cotton seed, emu, eucalyptus, evening primrose, fish, flaxseed, geraniol, gourd, grape seed, hazel nut, hyssop, isopropyl myristate, jojoba, kukui nut, lavandin, lavender, lemon, litsea cubeba, macademia nut, mallow, mango seed, meadowfoam seed, mink, nutmeg, olive, orange, orange roughy, palm, palm kernel, peach kernel, peanut, poppy seed, pumpkin seed, rapeseed, rice bran, rosemary, safflower, sandalwood, sasquana, savoury, sea buckthorn, sesame, shea butter, silicone, soybean, sunflower, tea tree, thistle, tsubaki, vetiver, walnut, and wheat germ oils. Exemplary synthetic oils include, but are not limited to, butyl stearate, caprylic triglyceride, capric triglyceride, cyclomethicone, diethyl sebacate, dimethicone 360, isopropyl myristate, mineral oil, octyldodecanol, oleyl alcohol, silicone oil, and combinations thereof.

[0702] Additionally, the composition may further comprise a polymer. Exemplary polymers contemplated herein include, but are not limited to, cellulosic polymers and copolymers, for example, cellulose ethers such as methylcellulose (MC), hydroxyethylcellulose (HEC), hydroxypropyl cellulose (HPC), hydroxypropyl methyl cellulose (HPMC), methylhydroxyethylcellulose (MHEC), methylhydroxypropylcellulose (MHPC), carboxymethyl cellulose (CMC) and its various salts, including, e.g., the sodium salt, hydroxyethylcarboxymethylcellulose (HECMC) and its various salts, carboxymethylhydroxyethylcellulose (CMHEC) and its various salts, other polysaccharides and polysaccharide derivatives such as starch, dextran, dextran derivatives, chitosan, and alginic acid and its various salts, carageenan, various gums, including xanthan gum, guar gum, gum arabic, gum karaya, gum ghatti, konjac and gum tragacanth, glycosaminoglycans and proteoglycans such as hyaluronic acid and its salts, proteins such as gelatin, collagen, albumin, and fibrin, other polymers, for example, polyhydroxyacids such as polylactide, polyglycolide, polyl(lactide-co-glycolide) and poly(.epsilon.-caprolactone-co-glycolide)-, carboxyvinyl polymers and their salts (e.g., carbomer), polyvinylpyrrolidone (PVP), polyacrylic acid and its salts, polyacrylamide, polyacrylic acid/acrylamide copolymer, polyalkylene oxides such as polyethylene oxide, polypropylene oxide, poly(ethylene oxide-propylene oxide), and a Pluronic polymer, polyoxy ethylene (polyethylene glycol), polyanhydrides, polyvinylalchol, polyethyleneamine and polypyrridine, polyethylene glycol (PEG) polymers, such as PEGylated lipids (e.g., PEG-stearate, 1,2-Distearoyl-sn-glycero-3-Phosphoethanolamine-N-[Methoxy (Polyethylene glycol)-1000], 1,2-Distearoyl-sn-glycero-3-Phosphoethanolamine-N-[Methoxy (Polyethylene glycol)-2000], and 1,2-Distearoyl-sn-glycero-3-Phosphoethanolamine-N-[Methoxy (Polyethylene glycol)-5000]), copolymers and salts thereof.

[0703] Additionally, the composition may further comprise an emulsifying agent. Exemplary emulsifying agents include, but are not limited to, a polyethylene glycol (PEG), a polypropylene glycol, a polyvinyl alcohol, a poly-N-vinyl pyrrolidone and copolymers thereof, poloxamer nonionic surfactants, neutral water-soluble polysaccharides (e.g., dextran, Ficoll, celluloses), non-cationic poly(meth)acrylates, non-cationic polyacrylates, such as poly(meth) acrylic acid, and esters amide and hydroxy alkyl amides thereof, natural emulsifiers (e.g. acacia, agar, alginic acid, sodium alginate, tragacanth, chondrux, cholesterol, xanthan, pectin, gelatin, egg yolk, casein, wool fat, cholesterol, wax, and lecithin), colloidal clays (e.g. bentonite [aluminum silicate] and Veegum [magnesium aluminum silicate]), long chain amino acid derivatives, high molecular weight alcohols (e.g. stearyl alcohol, cetyl alcohol, oleyl alcohol, triacetin monostearate, ethylene glycol distearate, glyceryl monostearate, and propylene glycol monostearate, polyvinyl alcohol), carbomers (e.g. carboxy polymethylene, polyacrylic acid, acrylic acid polymer, and carboxy vinyl polymer), carrageenan, cellulosic derivatives (e.g. carboxymethylcellulose sodium, powdered cellulose, hydroxymethyl cellulose, hydroxypropyl cellulose, hydroxypropyl methylcellulose, methylcellulose), sorbitan fatty acid esters (e.g. polyoxyethylene sorbitan monolaurate [Tween 20], polyoxyethylene sorbitan [Tween 60], polyoxyethylene sorbitan monooleate [Tween 80]. sorbitan monopalmitate [Span 40], sorbitan monostearate [Span 60], sorbitan tristearate [Span 65], glyceryl monooleate, sorbitan monooleate [Span 80]), polyoxyethylene esters (e.g. polyoxyethylene monostearate [Myrj 45], polyoxyethylene hydrogenated castor oil, polyethoxylated castor oil, polyoxymethylene stearate, and Solutol), sucrose fatty acid esters, polyethylene glycol fatty acid esters (e.g. Cremophor), polyoxyethylene ethers, (e.g. polyoxyethylene lauryl ether [Brij 30]), poly(vinyl-pyrrolidone), diethylene glycol monolaurate, triethanolamine oleate, sodium oleate, potassium oleate, ethyl oleate, oleic acid, ethyl laurate, sodium lauryl sulfate, Pluronic F 68, Poloxamer 188, cetrimonium bromide, cetylpyridinium chloride, benzalkonium chloride, docusate sodium, etc. and/or combinations thereof. In certain embodiments, the emulsifying agent is cholesterol.

[0704] Liquid compositions include emulsions, microemulsions, solutions, suspensions, syrups, and elixirs. In addition to the active compound, the liquid composition may contain inert diluents commonly used in the art such as, for example, water or other solvents, solubilizing agents and emulsifiers such as ethyl alcohol, isopropyl alcohol, ethyl carbonate, ethyl acetate, benzyl alcohol, benzyl benzoate, propylene glycol, 1,3-butylene glycol, dimethylformamide, oils (in particular, cottonseed, groundnut, corn, germ, olive, castor, and sesame oils), glycerol, tetrahydrofurfuryl alcohol, polyethylene glycols and fatty acid esters of sorbitan, and mixtures thereof. Besides inert diluents, the oral compositions can also include adjuvants such as wetting agents, emulsifying and suspending agents, sweetening, flavoring, and perfuming agents.

[0705] Injectable compositions, for example, injectable aqueous or oleaginous suspensions may be formulated according to the known art using suitable dispersing or wetting agents and suspending agents. The sterile injectable preparation may also be an injectable solution, suspension, or emulsion in a nontoxic parenterally acceptable diluent or solvent, for example, as a solution in 1,3-butanediol. Among the acceptable vehicles and solvents for pharmaceutical or cosmetic compositions that may be employed are water, Ringer's solution, U.S.P. and isotonic sodium chloride solution. In addition, sterile, fixed oils are conventionally employed as a solvent or suspending medium. Any bland fixed oil can be employed including synthetic mono- or diglycerides. In addition, fatty acids such as oleic acid are used in the preparation of injectables. In certain embodiments, the particles are suspended in a carrier fluid comprising 1% (w/v) sodium carboxymethyl cellulose and 0.1% (v/v) Tween 80. The injectable composition can be sterilized, for example, by filtration through a bacteria-retaining filter, or by incorporating sterilizing agents in the form of sterile solid compositions which can be dissolved or dispersed in sterile water or other sterile injectable medium prior to use.

[0706] Compositions for rectal or vaginal administration may be in the form of suppositories which can be prepared by mixing the particles with suitable non-irritating excipients or carriers such as cocoa butter, polyethylene glycol, or a suppository wax which are solid at ambient temperature but liquid at body temperature and therefore melt in the rectum or vaginal cavity and release the particles.

[0707] Solid compositions include capsules, tablets, pills, powders, and granules. In such solid compositions, the particles are mixed with at least one excipient and/or a) fillers or extenders such as starches, lactose, sucrose, glucose, mannitol, and silicic acid, b) binders such as, for example, carboxymethylcellulose, alginates, gelatin, polyvinylpyrrolidinone, sucrose, and acacia, c) humectants such as glycerol, d) disintegrating agents such as agar-agar, calcium carbonate, potato or tapioca starch, alginic acid, certain silicates, and sodium carbonate, e) solution retarding agents such as paraffin, f) absorption accelerators such as quaternary ammonium compounds, g) wetting agents such as, for example, cetyl alcohol and glycerol monostearate, h) absorbents such as kaolin and bentonite clay, and i) lubricants such as talc, calcium stearate, magnesium stearate, solid polyethylene glycols, sodium lauryl sulfate, and mixtures thereof. In the case of capsules, tablets, and pills, the dosage form may also comprise buffering agents. Solid compositions of a similar type may also be employed as fillers in soft and hard-filled gelatin capsules using such excipients as lactose or milk sugar as well as high molecular weight polyethylene glycols and the like.

[0708] Tablets, capsules, pills, and granules can be prepared with coatings and shells such as enteric coatings and other coatings well known in the pharmaceutical formulating art. They may optionally contain opacifying agents and can also be of a composition that they release the active ingredient(s) only, or preferentially, in a certain part of the intestinal tract, optionally, in a delayed manner. Examples of embedding compositions which can be used include polymeric substances and waxes. Solid compositions of a similar type may also be employed as fillers in soft and hard-filled gelatin capsules using such excipients as lactose or milk sugar as well as high molecular weight polyethylene glycols and the like.

[0709] Compositions for topical or transdermal administration include ointments, pastes, creams, lotions, gels, powders, solutions, sprays, inhalants, or patches. The active compound is admixed with an excipient and any needed preservatives or buffers as may be required.

[0710] The ointments, pastes, creams, and gels may contain, in addition to the active compound, excipients such as animal and vegetable fats, oils, waxes, paraffins, starch, tragacanth, cellulose derivatives, polyethylene glycols, silicones, bentonites, silicic acid, talc, and zinc oxide, or mixtures thereof.

[0711] Powders and sprays can contain, in addition to the active compound, excipients such as lactose, talc, silicic acid, aluminum hydroxide, calcium silicates, and polyamide powder, or mixtures of these substances. Sprays can additionally contain customary propellants such as chlorofluorohydrocarbons.

[0712] Transdermal patches have the added advantage of providing controlled delivery of a compound to the body. Such dosage forms can be made by dissolving or dispensing the nanoparticles in a proper medium. Absorption enhancers can also be used to increase the flux of the compound across the skin. The rate can be controlled by either providing a rate controlling membrane or by dispersing the particles in a polymer matrix or gel.

[0713] The compounds can be incorporated microparticles, nanoparticles, or combinations thereof that provide controlled release of the compounds and/or additional active agents. For example, the compounds can be incorporated into polymeric microparticles, which provide controlled release of the drug(s). Release of the drug(s) is controlled by diffusion of the drug(s) out of the microparticles and/or degradation of the polymeric particles by hydrolysis and/or enzymatic degradation. Suitable polymers include ethylcellulose and other natural or synthetic cellulose derivatives.

[0714] Polymers, which are slowly soluble and form a gel in an aqueous environment, such as hydroxypropyl methylcellulose or polyethylene oxide, may also be suitable as materials for drug containing microparticles. Other polymers include, but are not limited to, polyanhydrides, poly(ester anhydrides), polyhydroxy acids, such as polylactide (PLA), polyglycolide (PGA), poly(lactide-co-glycolide) (PLGA), poly-3-hydroxybutyrate (PHB) and copolymers thereof, poly-4-hydroxybutyrate (P4HB) and copolymers thereof, polycaprolactone and copolymers thereof, and combinations thereof.

[0715] Alternatively, the compound can be incorporated into microparticles prepared from materials which are insoluble in aqueous solution or slowly soluble in aqueous solution, but are capable of degrading within the GI tract by means including enzymatic degradation, surfactant action of bile acids, and/or mechanical erosion. As used herein, the term “slowly soluble in water” refers to materials that are not dissolved in water within a period of 30 minutes. Preferred examples include fats, fatty substances, waxes, wax-like substances and mixtures thereof. Suitable fats and fatty substances include fatty alcohols (such as lauryl, myristyl stearyl, cetyl or cetostearyl alcohol), fatty acids and derivatives, including but not limited to fatty acid esters, fatty acid glycerides (mono-, di- and tri-glycerides), and hydrogenated fats. Specific examples include, but are not limited to hydrogenated vegetable oil, hydrogenated cottonseed oil, hydrogenated castor oil, hydrogenated oils available under the trade name Sterotex®, stearic acid, cocoa butter, and stearyl alcohol. Suitable waxes and wax-like materials include natural or synthetic waxes, hydrocarbons, and normal waxes. Specific examples of waxes include beeswax, glycowax, castor wax, carnauba wax, paraffins and candelilla wax. As used herein, a wax-like material is defined as any material, which is normally solid at room temperature and has a melting point of from about 30 to 300° C.

[0716] In some cases, it may be desirable to alter the rate of water penetration into the microparticles. To this end, rate-controlling (wicking) agents may be formulated along with the fats or waxes listed above. Examples of rate-controlling materials include certain starch derivatives (e.g., waxy maltodextrin and drum dried corn starch), cellulose derivatives (e.g., hydroxypropylmethyl-cellulose, hydroxypropylcellulose, methylcellulose, and carboxymethyl-cellulose), alginic acid, lactose and talc. Additionally, a pharmaceutically acceptable surfactant (for example, lecithin) may be added to facilitate the degradation of such microparticles.

[0717] Proteins, which are water insoluble, such as zein, can also be used as materials for the formation of drug containing microparticles. Additionally, proteins, polysaccharides and combinations thereof, which are water-soluble, can be formulated with drug into microparticles and subsequently cross-linked to form an insoluble network. For example, cyclodextrins can be complexed with individual drug molecules and subsequently cross-linked.

[0718] Encapsulation or incorporation of drug into carrier materials to produce drug-containing microparticles can be achieved through known pharmaceutical formulation techniques. In the case of formulation in fats, waxes or wax-like materials, the carrier material is typically heated above its melting temperature and the drug is added to form a mixture comprising drug particles suspended in the carrier material, drug dissolved in the carrier material, or a mixture thereof. Microparticles can be subsequently formulated through several methods including, but not limited to, the processes of congealing, extrusion, spray chilling or aqueous dispersion. In a preferred process, wax is heated above its melting temperature, drug is added, and the molten wax-drug mixture is congealed under constant stirring as the mixture cools. Alternatively, the molten wax-drug mixture can be extruded and spheronized to form pellets or beads. These processes are known in the art.

[0719] For some carrier materials it may be desirable to use a solvent evaporation technique to produce drug-containing microparticles. In this case drug and carrier material are co-dissolved in a mutual solvent and microparticles can subsequently be produced by several techniques including, but not limited to, forming an emulsion in water or other appropriate media, spray drying or by evaporating off the solvent from the bulk solution and milling the resulting material.

[0720] In some embodiments, drug(s) in a particulate form is homogeneously dispersed in a water-insoluble or slowly water soluble material. To minimize the size of the drug particles within the composition, the drug powder itself may be milled to generate fine particles prior to formulation. The process of jet milling, known in the pharmaceutical art, can be used for this purpose. In some embodiments, drug in a particulate form is homogeneously dispersed in a wax or wax like substance by heating the wax or wax like substance above its melting point and adding the drug particles while stirring the mixture. In this case a pharmaceutically acceptable surfactant may be added to the mixture to facilitate the dispersion of the drug particles.

[0721] The particles can also be coated with one or more modified release coatings. Solid esters of fatty acids, which are hydrolyzed by lipases, can be spray coated onto microparticles or drug particles. Zein is an example of a naturally water-insoluble protein. It can be coated onto drug containing microparticles or drug particles by spray coating or by wet granulation techniques. In addition to naturally water-insoluble materials, some substrates of digestive enzymes can be treated with cross-linking procedures, resulting in the formation of non-soluble networks. Many methods of cross-linking proteins, initiated by both chemical and physical means, have been reported. One of the most common methods to obtain cross-linking is the use of chemical cross-linking agents. Examples of chemical cross-linking agents include aldehydes (gluteraldehyde and formaldehyde), epoxy compounds, carbodiimides, and genipin. In addition to these cross-linking agents, oxidized and native sugars have been used to cross-link gelatin. Cross-linking can also be accomplished using enzymatic means; for example, transglutaminase has been approved as a GRAS substance for cross-linking seafood products. Finally, cross-linking can be initiated by physical means such as thermal treatment, UV irradiation and gamma irradiation.

[0722] To produce a coating layer of cross-linked protein surrounding drug containing microparticles or drug particles, a water-soluble protein can be spray coated onto the microparticles and subsequently cross-linked by the one of the methods described above. Alternatively, drug-containing microparticles can be microencapsulated within protein by coacervation-phase separation (for example, by the addition of salts) and subsequently cross-linked. Some suitable proteins for this purpose include gelatin, albumin, casein, and gluten.

[0723] Polysaccharides can also be cross-linked to form a water-insoluble network. For many polysaccharides, this can be accomplished by reaction with calcium salts or multivalent cations, which cross-link the main polymer chains. Pectin, alginate, dextran, amylose and guar gum are subject to cross-linking in the presence of multivalent cations. Complexes between oppositely charged polysaccharides can also be formed; pectin and chitosan, for example, can be complexed via electrostatic interactions.

[0724] In certain embodiments, it may be desirable to provide continuous delivery of one or more compounds to a patient in need thereof. For intravenous or intraarterial routes, this can be accomplished using drip systems, such as by intravenous administration. For topical applications, repeated application can be done or a patch can be used to provide continuous administration of the compounds over an extended period of time.

[0725] The compounds described herein can be incorporated into injectable/implantable solid or semi-solid implants, such as polymeric implants. In one embodiment, the compounds are incorporated into a polymer that is a liquid or paste at room temperature, but upon contact with aqueous medium, such as physiological fluids, exhibits an increase in viscosity to form a semi-solid or solid material. Exemplary polymers include, but are not limited to, hydroxyalkanoic acid polyesters derived from the copolymerization of at least one unsaturated hydroxy fatty acid copolymerized with hydroxyalkanoic acids. The polymer can be melted, mixed with the active substance and cast or injection molded into a device. Such melt fabrication require polymers having a melting point that is below the temperature at which the substance to be delivered and polymer degrade or become reactive. The device can also be prepared by solvent casting where the polymer is dissolved in a solvent and the drug dissolved or dispersed in the polymer solution and the solvent is then evaporated. Solvent processes require that the polymer be soluble in organic solvents. Another method is compression molding of a mixed powder of the polymer and the drug or polymer particles loaded with the active agent.

[0726] Alternatively, the compounds can be incorporated into a polymer matrix and molded, compressed, or extruded into a device that is a solid at room temperature. For example, the compounds can be incorporated into a biodegradable polymer, such as polyanhydrides, polyhydroalkanoic acids (PHAs), PLA, PGA, PLGA, polycaprolactone, polyesters, polyamides, polyorthoesters, polyphosphazenes, proteins and polysaccharides such as collagen, hyaluronic acid, albumin and gelatin, and combinations thereof and compressed into solid device, such as disks, wafers, or extruded into a device, such as rods.

[0727] The release of the compounds from the implant can be varied by selection of the polymer, the molecular weight of the polymer, and/or modification of the polymer to increase degradation, such as the formation of pores and/or incorporation of hydrolyzable linkages. Methods for modifying the properties of biodegradable polymers to vary the release profile of the compounds from the implant are well known in the art.

[0728] In some embodiments, the compounds or pharmaceutical compositions can be administered locally. In some embodiments, the compounds are incorporated in a delivery system such as gels, nanoparticles, microparticles, or implants such as (e.g., rods, discs, wafers, orthopedic implants) for sustained release. In some embodiments, the compounds can be administered using a local delivery implantable system comprising the compounds incorporated within a gel, nanoparticles, microparticles, or an implant. In some embodiments, the pharmaceutical compositions comprise a delivery system such as gels, nanoparticles, microparticles, or implants such as (e.g., rods, discs, wafers, orthopedic implants) for sustained release of paroxetine or a pharmaceutically acceptable salt or derivative thereof.

[0729] The active ingredient may be administered in such amounts, time, and route deemed necessary in order to achieve the desired result. The exact amount of the active ingredient will vary from subject to subject, depending on the species, age, and general condition of the subject, the severity of the infection, the particular active ingredient, its mode of administration, its mode of activity, and the like. The active ingredient, whether the active compound itself, or the active compound in combination with an agent, is preferably formulated in dosage unit form for ease of administration and uniformity of dosage. It will be understood, however, that the total daily usage of the active ingredient will be decided by the attending physician within the scope of sound medical judgment. The specific therapeutically effective dose level for any particular subject will depend upon a variety of factors including the disorder being treated and the severity of the disorder; the activity of the active ingredient employed; the specific composition employed; the age, body weight, general health, sex and diet of the patient; the time of administration, route of administration, and rate of excretion of the specific active ingredient employed; the duration of the treatment; drugs used in combination or coincidental with the specific active ingredient employed; and like factors well known in the medical arts.

[0730] The active ingredient may be administered by any route. In some embodiments, the active ingredient is administered via a variety of routes, including oral, intravenous, intramuscular, intra-arterial, intramedullary, intrathecal, subcutaneous, intraventricular, transdermal, interdermal, rectal, intravaginal, intraperitoneal, topical (as by powders, ointments, creams, and/or drops), mucosal, nasal, bucal, enteral, sublingual; by intratracheal instillation, bronchial instillation, and/or inhalation; and/or as an oral spray, nasal spray, and/or aerosol. In general, the most appropriate route of administration will depend upon a variety of factors including the nature of the active ingredient (e.g., its stability in the environment of the gastrointestinal tract), the condition of the subject (e.g., whether the subject is able to tolerate oral administration), etc.

[0731] The exact amount of an active ingredient required to achieve a therapeutically or prophylactically effective amount will vary from subject to subject, depending on species, age, and general condition of a subject, severity of the side effects or disorder, identity of the particular compound(s), mode of administration, and the like. The amount to be administered to, for example, a child or an adolescent can be determined by a medical practitioner or person skilled in the art and can be lower or the same as that administered to an adult.

[0732] Useful dosages of the compositions disclosed herein can be determined by comparing their in vitro activity, and in vivo activity in animal models. Methods for the extrapolation of effective dosages in mice, and other animals, to humans are known to the art.

[0733] The dosage ranges for the administration of the compositions are those large enough to produce the desired effect in which the symptoms or disorder are affected. The dosage should not be so large as to cause adverse side effects, such as unwanted cross-reactions. anaphylactic reactions, and the like. Generally, the dosage will vary with the age, condition, sex and extent of the disease in the patient and can be determined by one of skill in the art. The dosage can be adjusted by the individual physician in the event of any counterindications. Dosage can vary, and can be administered in one or more dose administrations daily, for one or several days.

[0734] Compositions described herein are typically formulated in dosage unit form for ease of administration and uniformity of dosage. It will be understood, however, that the total daily usage of compositions may be decided by the attending physician within the scope of sound medical judgment. The specific therapeutically effective, prophylactically effective, or appropriate imaging dose level for any particular patient will depend upon a variety of factors including the disorder being treated and the severity of the disorder; the activity of the specific compound employed; the specific composition employed; the age, body weight, general health, sex and diet of the patient; the time of administration, route of administration, and rate of excretion of the specific compound employed; the duration of the treatment; drugs used in combination or coincidental with the specific compound employed; and like factors well known in the medical arts.

[0735] In some embodiments, the compositions may be administered at dosage levels sufficient to deliver 0.0001 mg/kg to 100 mg/kg, 0.001 mg/kg to 0.05 mg/kg, 0.005 mg/kg to 0.05 mg/kg, 0.001 mg/kg to 0.005 mg/kg, 0.05 mg/kg to 0.5 mg/kg, 0.01 mg/kg to 50 mg/kg, 0.1 mg/kg to 40 mg/kg, 0.5 mg/kg to 30 mg/kg, 0.01 mg/kg to 10 mg/kg, 0.1 mg/kg to 10 mg/kg, or 1 mg/kg to 25 mg/kg, of subject body weight per day, one or more times a day, per week, per month, etc. to obtain the desired therapeutic, diagnostic, prophylactic, or imaging effect (see, e.g., the range of unit doses described in International Publication No WO2013078199, the contents of which are herein incorporated by reference in their entirety). The desired dosage may be delivered three times a day, two times a day, once a day, every other day, every third day, every week, every two weeks, every three weeks, every four weeks, every 2 months, every three months, every 6 months, etc. In some embodiments, the desired dosage may be delivered using multiple administrations (e.g., two, three, four, five, six, seven, eight, nine, ten, eleven, twelve, thirteen, fourteen, or more administrations). When multiple administrations are employed, split dosing regimens such as those described herein may be used. In exemplary embodiments, compositions may be administered at dosage levels sufficient to deliver 0.0005 mg/kg to 0.01 mg/kg, e.g., about 0.0005 mg/kg to about 0.0075 mg/kg, e.g., about 0.0005 mg/kg, about 0.001 mg/kg, about 0.002 mg/kg, about 0.003 mg/kg, about 0.004 mg/kg or about 0.005 mg/kg.

[0736] In some embodiments, the compositions may be administered once or twice (or more) at dosage levels sufficient to deliver 0.025 mg/kg to 0.250 mg/kg, 0.025 mg/kg to 0.500 mg/kg, 0.025 mg/kg to 0.750 mg/kg, or 0.025 mg/kg to 1.0 mg/kg.

[0737] In some embodiments, the compositions may be administered twice (e.g., Day 0 and Day 7, Day 0 and Day 14, Day 0 and Day 21, Day 0 and Day 28, Day 0 and Day 60, Day 0 and Day 90, Day 0 and Day 120, Day 0 and Day 150, Day 0 and Day 180, Day 0 and 3 months later, Day 0 and 6 months later, Day 0 and 9 months later, Day 0 and 12 months later, Day 0 and 18 months later, Day 0 and 2 years later, Day 0 and 5 years later, or Day 0 and 10 years later) at a total dose of or at dosage levels sufficient to deliver a total dose of 0.0100 mg, 0.025 mg, 0.050 mg, 0.075 mg, 0.100 mg, 0.125 mg, 0.150 mg, 0.175 mg, 0.200 mg, 0.225 mg, 0.250 mg, 0.275 mg, 0.300 mg, 0.325 mg, 0.350 mg, 0.375 mg, 0.400 mg, 0.425 mg, 0.450 mg, 0.475 mg, 0.500 mg, 0.525 mg, 0.550 mg, 0.575 mg, 0.600 mg, 0.625 mg, 0.650 mg, 0.675 mg, 0.700 mg, 0.725 mg, 0.750 mg, 0.775 mg, 0.800 mg, 0.825 mg, 0.850 mg, 0.875 mg, 0.900 mg, 0.925 mg, 0.950 mg, 0.975 mg, or 1.0 mg. Higher and lower dosages and frequency of administration are encompassed by the present disclosure. For example, a composition described herein may be administered three or four times.

[0738] In some embodiments, the compositions may be administered twice (e.g., Day 0 and Day 7, Day 0 and Day 14, Day 0 and Day 21, Day 0 and Day 28, Day 0 and Day 60, Day 0 and Day 90, Day 0 and Day 120, Day 0 and Day 150, Day 0 and Day 180, Day 0 and 3 months later, Day 0 and 6 months later, Day 0 and 9 months later, Day 0 and 12 months later, Day 0 and 18 months later, Day 0 and 2 years later, Day 0 and 5 years later, or Day 0 and 10 years later) at a total dose of or at dosage levels sufficient to deliver a total dose of 0.010 mg. 0.025 mg, 0.100 mg or 0.400 mg.

[0739] In some embodiments, the composition (e.g., vaccine) for use in a method of vaccinating a subject is administered to the subject as a single dosage of between 10 μg/kg and 400 μg/kg of the nucleic acid vaccine (in an effective amount to vaccinate the subject). In some embodiments, the composition (e.g., vaccine) for use in a method of vaccinating a subject is administered to the subject as a single dosage of between 10 μg and 400 μg of the nucleic acid vaccine (in an effective amount to vaccinate the subject). In some embodiments, a composition (e.g., vaccine) for use in a method of vaccinating a subject is administered to the subject as a single dosage of 25-1000 ug (e.g., a single dosage of mRNA encoding an infection agent and a mRNA encoding T-cell epitope, or an mRNA encoding an infection agent and at least one universal T-cell epitope). In some embodiments, a composition (e.g., vaccine) is administered to the subject as a single dosage of 25, 50, 100, 150, 200, 250, 300, 350, 400, 450, 500, 550, 600, 650, 700, 750, 800, 850, 900, 950 or 1000 ug. For example, a composition (e.g., vaccine) may be administered to a subject as a single dose of 25-100, 25-500, 50-100, 50-500, 50-1000, 100-500, 100-1000, 250-500, 250-1000, or 500-1000 ug. In some embodiments, a composition (e.g., vaccine) for use in a method of vaccinating a subject is administered to the subject as two dosages, the combination of which equals 25-1000 ug of the composition (e.g., vaccine).

[0740] A composition (e.g., vaccine pharmaceutical composition) described herein can be formulated into a dosage form described herein, such as an intranasal, intratracheal, or injectable (e.g., intravenous, intraocular, intravitreal, intramuscular, intradermal, intracardiac, intraperitoneal, and subcutaneous).

### Methods of Use

[0741] Provided herein are compositions (e.g., pharmaceutical compositions), methods, kits and reagents for prevention and/or treatment of infections in humans and other mammals. The compositions described herein (e.g., vaccines) can be used as therapeutic or prophylactic agents, alone or in combination with other vaccine(s). They may be used in medicine to prevent and/or treat infection. In exemplary aspects, the compositions of the present disclosure are used to provide prophylactic protection from an infection agent. Prophylactic protection from an infection agent can be achieved following administration of a composition (e.g., vaccine) of the present disclosure. Composition (e.g., vaccine) of the present disclosure may be used to treat or prevent viral “co-infections” containing two or more infections. The composition (e.g., vaccine) can be administered once, twice, three times, four times or more, but it is likely sufficient to administer the composition (e.g., vaccine) once (optionally followed by a single booster). It is possible, although less desirable, to administer the composition (e.g., vaccine) to an infected individual to achieve a therapeutic response. Dosing may need to be adjusted accordingly.

[0742] Described herein are methods of treating, inhibiting, reducing, ameliorating, and/or preventing an infection caused by an infection agent in a subject comprising administering to the subject a composition described herein, a nanoparticle described herein, a vector described herein, or a vaccine described herein.

[0743] In some embodiments, also described are methods of treating an infection caused by an infection agent in a subject comprising administered to the subject a composition described herein, a nanoparticle described herein, a vector described herein, or a vaccine described herein.

[0744] In some embodiments. also described are methods of activating T cells comprising contacting the T cells with a composition described herein, a nanoparticle described herein, a vector described herein, or a vaccine described herein.

[0745] In some embodiments, also described are methods of stimulating the proliferation of T cells comprising contacting the T cells with a composition described herein, a nanoparticle described herein, or a vaccine described herein.

[0746] In some embodiments, also described are methods of eliciting an immune response in a subject to an infection agent comprising administering to the subject a composition described herein, a nanoparticle described herein, or a vaccine described herein. In some embodiments, the immune response can include a cellular immune response. a humoral immune response, or a combination thereof. In some embodiments, the immune response can include a cellular immune response, a humoral immune response, or a combination thereof, without risking the possibility of insertional mutagenesis.

[0747] In some embodiments, also described are methods of enhancing an immune response generated by an mRNA vaccine including introducing an mRNA encoding at least one T-cell epitope into the mRNA vaccine. In some embodiments, introduction of the mRNA encoding at least one T-cell epitope can increase immune response against variants of an infection agent.

[0748] In some embodiments, the composition (e.g., vaccine) of the present disclosure are used in the priming of immune effector cells, for example, to activate peripheral blood mononuclear cells (PBMCs) ex vivo, which are then infused (re-infused) into a subject.

[0749] In some embodiments, the composition (e.g., vaccine) containing RNA (e.g., mRNA) polynucleotides as described herein can be administered to a subject (e.g., a mammalian subject, such as a human subject), and the RNA (e.g., mRNA) polynucleotides are translated in vivo to produce an antigenic polypeptide and at least one universal T-cell epitope.

[0750] The composition (e.g., vaccine) may be induced for translation of a polypeptide (e.g., antigen or immunogen) in a cell, tissue or organism. In some embodiments, such translation occurs in vivo, although such translation may occur ex vivo, in culture or in vitro. In some embodiments, the cell, tissue or organism is contacted with an effective amount of a composition containing one or more RNA (e.g., mRNA) that contains a polynucleotide that has at least one a translatable region encoding an antigenic polypeptide and at least one universal T-cell epitope.

[0751] An “effective amount” of a composition (e.g., vaccine) is provided based, at least in part, on the target tissue, target cell type, means of administration, physical characteristics of the polynucleotide (e.g., size, and extent of modified nucleosides) and other components of the composition (e.g., vaccine), and other determinants. In general, an effective amount of the composition (e.g., vaccine) provides an induced or boosted immune response as a function of antigen production in the cell, preferably more efficient than a composition containing a corresponding unmodified polynucleotide encoding the same antigen or a peptide antigen. Increased antigen production may be demonstrated by increased cell transfection (the percentage of cells transfected with the RNA, e.g., mRNA), increased protein translation from the polynucleotide, decreased nucleic acid degradation (as demonstrated, for example, by increased duration of protein translation from a modified polynucleotide), or altered antigen specific immune response of the host cell.

[0752] In some embodiments, anti-antigenic polypeptide antibody titer in the subject is increased following vaccination relative to anti-antigenic polypeptide antibody titer in a subject vaccinated with a prophylactically effective dose of a traditional vaccine against the infection agent. An “anti-antigenic polypeptide antibody” is a serum antibody the binds specifically to the antigenic polypeptide.

[0753] In some embodiments, a composition (e.g., vaccine) described herein capable of eliciting an immune response is administered intramuscularly via a composition including a compound according to Formula A, I, Ia, or II-V, or any combination thereof described herein.

[0754] In some embodiments the anti-antigenic polypeptide antibody titer in the subject is increased 1 log to 10 log following vaccination relative to anti-antigenic polypeptide antibody titer in a subject vaccinated with a prophylactically effective dose of a traditional vaccine an infection agent.

[0755] In some embodiments the anti-antigenic polypeptide antibody titer in the subject is increased 1 log, 2 log, 3 log, 5 log or 10 log following vaccination relative to anti-antigenic polypeptide antibody titer in a subject vaccinated with a prophylactically effective dose of a traditional vaccine against infection agent.

[0756] A prophylactically effective dose is a therapeutically effective dose that prevents infection with the virus at a clinically acceptable level. In some embodiments, the therapeutically effective dose is a dose listed in a package insert for the composition (e.g., vaccine). A traditional vaccine, as used herein, refers to a vaccine other than the RNA (e.g., mRNA) vaccines described herein. For instance, a traditional vaccine includes but is not limited to RNA (e.g., mRNA) vaccines that do not encode at least one universal T-cell epitope, live/attenuated microorganism vaccines, killed/inactivated microorganism vaccines, subunit vaccines, protein antigen vaccines, DNA vaccines, VLP vaccines, etc. In exemplary embodiments, a traditional vaccine is a vaccine that has achieved regulatory approval and/or is registered by a national drug regulatory body, for example the Food and Drug Administration (FDA) in the United States or the European Medicines Agency (EMA).

[0757] RNA (e.g. mRNA) vaccines described herein may be administered prophylactically or therapeutically as part of an active immunization scheme to healthy individuals or early in infection during the incubation phase or during active infection after onset of symptoms. In some embodiments, the amount of RNA (e.g., mRNA) vaccine of the present disclosure provided to a cell, a tissue or a subject may be an amount effective for immune prophylaxis.

[0758] RNA (e.g. mRNA) vaccines may be administrated with other prophylactic or therapeutic compounds. As a non-limiting example, a prophylactic or therapeutic compound may be an adjuvant or a booster. As used herein, when referring to a prophylactic composition, such as a vaccine, the term “booster” refers to an extra administration of the prophylactic (vaccine) composition. A booster (or booster vaccine) may be given after an earlier administration of the prophylactic composition. The time of administration between the initial administration of the prophylactic composition and the booster may be, but is not limited to, 1 minute, 2 minutes, 3 minutes, 4 minutes, 5 minutes, 6 minutes, 7 minutes, 8 minutes, 9 minutes, minutes, 15 minutes, 20 minutes 35 minutes, 40 minutes, 45 minutes, 50 minutes, 55 minutes, 1 hour, 2 hours, 3 hours, 4 hours, 5 hours, 6 hours, 7 hours, 8 hours, 9 hours, 10 hours, 11 hours, 12 hours, 13 hours, 14 hours, 15 hours, 16 hours, 17 hours, 18 hours, 19 hours, 20 hours, 21 hours, 22 hours, 23 hours, 1 day, 36 hours, 2 days, 3 days, 4 days, 5 days, 6 days, 1 week, 10 days, 2 weeks, 3 weeks, 1 month, 2 months, 3 months, 4 months, 5 months, 6 months, 7 months, 8 months, 9 months, 10 months, 11 months, 1 year, 18 months, 2 years, 3 years, 4 years, 5 years, 6 years, 7 years, 8 years, 9 years, 10 years, 11 years, 12 years, 13 years, 14 years, 15 years, 16 years, 17 years, 18 years, 19 years, 20 years, 25 years, 30 years, 35 years, 40 years, 45 years, 50 years, 55 years, 60 years, 65 years, 70 years, 75 years, 80 years, 85 years, 90 years, 95 years or more than 99 years. In some embodiments, the time of administration between the initial administration of the prophylactic composition and the booster may be, but is not limited to, 1 week, 2 weeks, 3 weeks, 1 month, 2 months, 3 months, 6 months or 1 year.

[0759] In some embodiments, the immune response in the subject is equivalent to an immune response in a subject vaccinated with a traditional vaccine at 2, 3, 4, 5, 10, 50, 100 times the dosage level relative to the RNA (e.g., mRNA) vaccine described herein.

[0760] In some embodiments the immune response in the subject is equivalent to an immune response in a subject vaccinated with a traditional vaccine at 10-100 times, or 100-1000 times, the dosage level relative to the RNA (e.g., mRNA) vaccine described herein.

[0761] In some embodiments the immune response is assessed by determining [protein]antibody titer in the subject.

[0762] In some embodiments, the immune response in the subject is induced 2 days earlier, or 3 days earlier, relative to an immune response induced in a subject vaccinated with a prophylactically effective dose of a traditional vaccine.

[0763] In some embodiments the immune response in the subject is induced 1 week, 2 weeks, 3 weeks, 5 weeks, or 10 weeks earlier relative to an immune response induced in a subject vaccinated with a prophylactically effective dose of a traditional vaccine.

[0764] In some embodiments, RNA (e.g. mRNA) vaccines may be administered intramuscularly or intradermally, similarly to the administration of inactivated vaccines known in the art.

[0765] Some aspects of the present disclosure provide compositions, wherein the RNA (e.g., mRNA) vaccine is formulated in an effective amount to produce an antigen specific immune response in a subject (e.g., production of antibodies specific to an infection agent antigenic polypeptide). “An effective amount” is a dose of an RNA (e.g., mRNA) vaccine effective to produce an antigen-specific immune response. Also provided herein are methods of inducing an antigen-specific immune response in a subject.

[0766] In some embodiments, the antigen-specific immune response is characterized by measuring an anti-infection agent antigenic polypeptide antibody titer produced in a subject administered a composition as provided herein. An antibody titer is a measurement of the amount of antibodies within a subject, for example, antibodies that are specific to a particular antigen (e.g., an anti-infection agent antigenic polypeptide) or epitope of an antigen. Antibody titer is typically expressed as the inverse of the greatest dilution that provides a positive result. Enzyme-linked immunosorbent assay (ELISA) is a common assay for determining antibody titers, for example.

[0767] In some embodiments, an antibody titer is used to assess whether a subject has had an infection or to determine whether immunizations are required. In some embodiments, an antibody titer is used to determine the strength of an autoimmune response, to determine whether a booster immunization is needed, to determine whether a previous vaccine was effective, and to identify any recent or prior infections. In accordance with the present disclosure, an antibody titer may be used to determine the strength of an immune response induced in a subject by the RNA (e.g., mRNA) vaccine described herein.

[0768] In some embodiments, an anti-antigenic polypeptide antibody titer produced in a subject is increased by at least 1 log relative to a control. For example, anti-antigenic polypeptide antibody titer produced in a subject may be increased by at least 1.5, at least 2, at least 2.5, or at least 3 log relative to a control. In some embodiments, the anti-antigenic polypeptide antibody titer produced in the subject is increased by 1, 1.5, 2, 2.5 or 3 log relative to a control. In some embodiments, the anti-antigenic polypeptide antibody titer produced in the subject is increased by 1-3 log relative to a control. For example, the anti-antigenic polypeptide antibody titer produced in a subject may be increased by 1-1.5, 1-2, 1-2.5, 1-3, 1.5-2, 1.5-2.5, 1.5-3, 2-2.5, 2-3, or 2.5-3 log relative to a control.

[0769] In some embodiments, the anti-antigenic polypeptide antibody titer produced in a subject is increased at least 2 times relative to a control. For example, the anti-antigenic polypeptide antibody titer produced in a subject may be increased at least 3 times, at least 4 times, at least 5 times, at least 6 times, at least 7 times, at least 8 times, at least 9 times, or at least 10 times relative to a control. In some embodiments, the anti-antigenic polypeptide antibody titer produced in the subject is increased 2, 3, 4, 5, 6, 7, 8, 9, or 10 times relative to a control. In some embodiments, the anti-antigenic polypeptide antibody titer produced in a subject is increased 2-10 times relative to a control. For example, the anti-antigenic polypeptide antibody titer produced in a subject may be increased 2-10, 2-9, 2-8, 2-7, 2-6, 2-5, 2-4, 2-3, 3-10, 3-9, 3-8, 3-7, 3-6, 3-5, 3-4, 4-10, 4-9, 4-8, 4-7, 4-6, 4-5, 5-10, 5-9, 5-8, 5-7, 5-6, 6-10, 6-9, 6-8, 6-7, 7-10, 7-9, 7-8, 8-10, 8-9, or 9-10 times relative to a control.

[0770] A control, in some embodiments, is the anti-antigenic polypeptide antibody titer produced in a subject who has not been administered a RNA (e.g., mRNA) vaccine of the present disclosure. In some embodiments, a control is an anti-antigenic polypeptide antibody titer produced in a subject who has been administered a RNA (e.g., mRNA) vaccine that do not encode at least one universal T-cell epitope. In some embodiments, a control is an anti-antigenic polypeptide antibody titer produced in a subject who has been administered a live attenuated vaccine. An attenuated vaccine is a vaccine produced by reducing the virulence of a viable (live). An attenuated virus is altered in a manner that renders it harmless or less virulent relative to live, unmodified virus. In some embodiments, a control is an anti-antigenic polypeptide antibody titer produced in a subject administered inactivated vaccine. In some embodiments, a control is an anti-antigenic polypeptide antibody titer produced in a subject administered a recombinant or purified protein vaccine. Recombinant protein vaccines typically include protein antigens that either have been produced in a heterologous expression system (e.g., bacteria or yeast) or purified from large amounts of the pathogenic organism. In some embodiments, a control is an anti-antigenic polypeptide antibody titer produced in a subject who has been administered a virus-like particle (VLP) vaccine.

[0771] In some embodiments, an effective amount of a RNA (e.g., mRNA) vaccine is a dose that is reduced compared to the standard of care dose of a recombinant protein vaccine. A “standard of care,” as provided herein, refers to a medical or psychological treatment guideline and can be general or specific. “Standard of care” specifies appropriate treatment based on scientific evidence and collaboration between medical professionals involved in the treatment of a given condition. It is the diagnostic and treatment process that a physician/clinician should follow for a certain type of patient, illness or clinical circumstance. A “standard of care dose,” as provided herein, refers to the dose of a recombinant or purified protein vaccine, or a live attenuated or inactivated vaccine, that a physician/clinician or other medical professional would administer to a subject to treat or prevent an infection agent-related condition, while following the standard of care guideline for treating or preventing an infection agent-related condition.

[0772] In some embodiments, the anti-antigenic polypeptide antibody titer produced in a subject administered an effective amount of a RNA (e.g., mRNA) vaccine is equivalent to an anti-antigenic polypeptide antibody titer produced in a control subject administered a standard of care dose of a recombinant or purified protein vaccine or a live attenuated or inactivated vaccine.

[0773] In some embodiments, an effective amount of a RNA (e.g., mRNA) vaccine is a dose equivalent to an at least 2-fold reduction in a standard of care dose of a recombinant or purified protein vaccine. For example, an effective amount of a RNA (e.g., mRNA) vaccine may be a dose equivalent to an at least 3-fold, at least 4-fold, at least 5-fold, at least 6-fold, at least 7-fold, at least 8-fold, at least 9-fold, or at least 10-fold reduction in a standard of care dose of a recombinant or purified protein vaccine. In some embodiments, an effective amount of a RNA (e.g., mRNA) vaccine is a dose equivalent to an at least at least 100-fold, at least 500-fold, or at least 1000-fold reduction in a standard of care dose of a recombinant or purified protein vaccine. In some embodiments, an effective amount of a RNA (e.g., mRNA) vaccine is a dose equivalent to a 2-, 3-. 4-, 5-, 6-, 7-, 8-, 9-, 10-, 20-, 50-, 100-, 250-, 500-, or 1000-fold reduction in a standard of care dose of a recombinant or purified protein vaccine. In some embodiments, the anti-antigenic polypeptide antibody titer produced in a subject administered an effective amount of a RNA (e.g., mRNA) vaccine is equivalent to an anti-antigenic polypeptide antibody titer produced in a control subject administered the standard of care dose of a recombinant or protein protein vaccine or a live attenuated or inactivated vaccine. In some embodiments, an effective amount of a RNA (e.g., mRNA) vaccine is a dose equivalent to a 2-fold to 1000-fold (e.g., 2-fold to 100-fold, 10-fold to 1000-fold) reduction in the standard of care dose of a recombinant or purified protein vaccine, wherein the anti-antigenic polypeptide antibody titer produced in the subject is equivalent to an anti-antigenic polypeptide antibody titer produced in a control subject administered the standard of care dose of a recombinant or purified protein vaccine or a live attenuated or inactivated vaccine.

[0774] In some embodiments, the effective amount of a RNA (e.g., mRNA) vaccine is a dose equivalent to a 2 to 1000-, 2 to 900-, 2 to 800-, 2 to 700-, 2 to 600-, 2 to 500-, 2 to 400-, 2 to 300-, 2 to 200-, 2 to 100-, 2 to 90-, 2 to 80-, 2 to 70-, 2 to 60-, 2 to 50-, 2 to 40-, 2 to 30-, 2 to 20-, 2 to 10-, 2 to 9-, 2 to 8-, 2 to 7-, 2 to 6-. 2 to 5-, 2 to 4-, 2 to 3-, 3 to 1000-, 3 to 900-, 3 to 800-, 3 to 700-, 3 to 600-, 3 to 500-, 3 to 400-, 3 to 3 to 00-, 3 to 200-, 3 to 100-, 3 to 90-, 3 to 80-, 3 to 70-, 3 to 60-, 3 to 50-, 3 to 40-, 3 to 30-, 3 to 20-, 3 to 10-, 3 to 9-, 3 to 8-, 3 to 7-, 3 to 6-, 3 to 5-, 3 to 4-, 4 to 1000-, 4 to 900-, 4 to 800-, 4 to 700-, 4 to 600-, 4 to 500-, 4 to 400-, 4 to 4 to 00-, 4 to 200-, 4 to 100-, 4 to 90-, 4 to 80-, 4 to 70-, 4 to 60-, 4 to 50-, 4 to 40-, 4 to 30-, 4 to 20-, 4 to 10-, 4 to 9-, 4 to 8-, 4 to 7-, 4 to 6-, 4 to 5-, 4 to 4-, 5 to 1000-, 5 to 900-, 5 to 800-, 5 to 700-, 5 to 600-, 5 to 500-, 5 to 400-, 5 to 300-, 5 to 200-, 5 to 100-, 5 to 90-, 5 to 80-, 5 to 70-, 5 to 60-, 5 to 50-, 5 to 40-, 5 to 30-, 5 to 20-, 5 to 10-, 5 to 9-, 5 to 8-, 5 to 7-, 5 to 6-, 6 to 1000-, 6 to 900-, 6 to 800-, 6 to 700-, 6 to 600-, 6 to 500-, 6 to 400-, 6 to 300-, 6 to 200-, 6 to 100-, 6 to 90-, 6 to 80-, 6 to 70-, 6 to 60-, 6 to 50-, 6 to 40-, 6 to 30-, 6 to 20-, 6 to 10-, 6 to 9-, 6 to 8-, 6 to 7-, 7 to 1000-, 7 to 900-, 7 to 800-, 7 to 700-, 7 to 600-, 7 to 500-, 7 to 400-, 7 to 300-, 7 to 200-, 7 to 100-, 7 to 90-, 7 to 80-, 7 to 70-, 7 to 60-, 7 to 50-, 7 to 40-, 7 to 30-. 7 to 20-, 7 to 10-, 7 to 9-, 7 to 8-, 8 to 1000-, 8 to 900-, 8 to 800-, 8 to 700-, 8 to 600-, 8 to 500-, 8 to 400-, 8 to 300-, 8 to 200-, 8 to 100-, 8 to 90-, 8 to 80-, 8 to 70-, 8 to 60-, 8 to 50-, 8 to 40-, 8 to 30-, 8 to 20-, 8 to 10-, 8 to 9-, 9 to 1000-, 9 to 900-, 9 to 800-, 9 to 700-, 9 to 600-, 9 to 500-, 9 to 400-, 9 to 300-, 9 to 200-, 9 to 100-, 9 to 90-, 9 to 80-, 9 to 70-, 9 to 60-, 9 to 50-, 9 to 40-, 9 to 30-, 9 to 20-, 9 to 10-, 10 to 1000-, 10 to 900-, 10 to 800-, 10 to 700-, 10 to 600-, 10 to 500-, 10 to 400-, 10 to 300-, 10 to 200-. 10 to 100-, 10 to 90-, 10 to 80-, 10 to 70-, 10 to 60-, 10 to 50-, 10 to 40-, 10 to 30-, 10 to 20-, 20 to 1000-, 20 to 900-, 20 to 800-, 20 to 700-, 20 to 600-, 20 to 500-, 20 to 400-, 20 to 300-, 20 to 200-, 20 to 100-, 20 to 90-, 20 to 80-, 20 to 70-, 20 to 60-, 20 to 50-, 20 to 40-, 20 to 30-, 30 to 1000-, 30 to 900-, 30 to 800-, 30 to 700-, 30 to 600-, 30 to 500-, 30 to 400-, 30 to 300-, 30 to 200-, 30 to 100-, 30 to 90-, 30 to 80-, 30 to 70-, 30 to 60-, 30 to 50-, 30 to 40-, 40 to 1000-, 40 to 900-, 40 to 800-, 40 to 700-, 40 to 600-, 40 to 500-, 40 to 400-, 40 to 300-, 40 to 200-, 40 to 100-, 40 to 90-, 40 to 80-, 40 to 70-, 40 to 60-, 40 to 50-, 50 to 1000-, 50 to 900-, 50 to 800-, 50 to 700-, 50 to 600-, 50 to 500-, 50 to 400-, 50 to 300-, 50 to 200-, 50 to 100-, 50 to 90-, 50 to 80-, 50 to 70-, 50 to 60-, 60 to 1000-, 60 to 900-, 60 to 800-, 60 to 700-, 60 to 600-, 60 to 500-, 60 to 400-, 60 to 300-, 60 to 200-, 60 to 100-, 60 to 90-, 60 to 80-, 60 to 70-, 70 to 1000-, 70 to 900-, 70 to 800-, 70 to 700-, 70 to 600-, 70 to 500-, 70 to 400-, 70 to 300-, 70 to 200-. 70 to 100-, 70 to 90-, 70 to 80-, 80 to 1000-, 80 to 900-, 80 to 800-, 80 to 700-, 80 to 600-, 80 to 500-, 80 to 400-, 80 to 300-, 80 to 200-, 80 to 100-, 80 to 90-, 90 to 1000-, 90 to 900-, 90 to 800-, 90 to 700-, 90 to 600-, 90 to 500-, 90 to 400-, 90 to 300-, 90 to 200-, 90 to 100-, 100 to 1000-, 100 to 900-, 100 to 800-, 100 to 700-, 100 to 600-, 100 to 500-, 100 to 400-, 100 to 300-, 100 to 200-, 200 to 1000-, 200 to 900-, 200 to 800-, 200 to 700-, 200 to 600-, 200 to 500-, 200 to 400-, 200 to 300-, 300 to 1000-, 300 to 900-, 300 to 800-, 300 to 700-, 300 to 600-, 300 to 500-, 300 to 400-, 400 to 1000-, 400 to 900-, 400 to 800-, 400 to 700-, 400 to 600-, 400 to 500-, 500 to 1000-, 500 to 900-, 500 to 800-, 500 to 700-, 500 to 600-, 600 to 1000-, 600 to 900-, 600 to 800-, 600 to 700-, 700 to 1000-, 700 to 900-, 700 to 800-, 800 to 1000-, 800 to 900-, or 900 to 1000-fold reduction in the standard of care dose of a recombinant protein vaccine. In some embodiments, the anti-antigenic polypeptide antibody titer produced in the subject is equivalent to an anti-antigenic polypeptide antibody titer produced in a control subject administered the standard of care dose of a recombinant or purified protein vaccine or a live attenuated or inactivated vaccine. In some embodiments, the effective amount is a dose equivalent to (or equivalent to an at least) 2-, 3—, 4-, 5-, 6-, 7-, 8-, 9-, 10-, 20-. 30-, 40-, 50-. 60-, 70-, 80-, 90-, 100-, 110-, 120-, 130-, 140-, 150-, 160-, 170-, 1280-, 190-, 200-, 210-, 220-, 230-, 240-, 250-, 260-, 270-, 280-, 290-, 300-, 310-, 320-, 330-, 340-, 350-, 360-, 370-, 380-, 390-, 400-, 410-, 420-, 430-, 440-, 450-, 4360-, 470-, 480-, 490-, 500-, 510-, 520-, 530-, 540-, 550-, 560-, 5760-. 580-, 590-, 600-, 610-, 620-, 630-, 640-, 650-, 660-, 670-, 680-, 690-, 700-, 710-, 720-, 730-, 740-, 750-, 760-, 770-, 780-, 790-, 800-, 810-, 820-, 830-, 840-, 850-, 860-, 870-, 880-, 890-, 900-, 910-, 920-, 930-, 940-, 950-, 960-, 970-, 980-, 990-, or 1000-fold reduction in the standard of care dose of a recombinant protein vaccine. In some embodiments, an anti-antigenic polypeptide antibody titer produced in the subject is equivalent to an anti-antigenic polypeptide antibody titer produced in a control subject administered the standard of care dose of a recombinant or purified protein vaccine or a live attenuated or inactivated vaccine.

[0775] RNA (e.g. mRNA) vaccines may be utilized in various settings depending on the prevalence of the infection or the degree or level of unmet medical need. As a non-limiting example, the RNA (e.g., mRNA) vaccines may be utilized to treat and/or prevent a variety of infections. RNA (e.g., mRNA) vaccines have superior properties in that they produce much larger antibody titers and produce responses early than commercially available anti-viral agents/compositions.

[0776] Provided herein are pharmaceutical compositions including RNA (e.g. mRNA) and RNA (e.g. mRNA) vaccine compositions and/or complexes optionally in combination with one or more pharmaceutically acceptable excipients.

[0777] The compositions (e.g., vaccines) may be formulated or administered alone or in conjunction with one or more other components. For instance, RNA (e.g., mRNA) vaccines (vaccine compositions) may comprise other components including, but not limited to, adjuvants.

[0778] In some embodiments, RNA (e.g. mRNA) compositions do not include an adjuvant (they are adjuvant free).

[0779] The compositions (e.g., vaccines) may be formulated or administered in combination with one or more pharmaceutically-acceptable excipients. In some embodiments, compositions comprise at least one additional active substances, such as, for example, a therapeutically-active substance, a prophylactically-active substance, or a combination of both. The compositions may be sterile, pyrogen-free or both sterile and pyrogen-free. General considerations in the formulation and/or manufacture of pharmaceutical agents, such as vaccine compositions, may be found, for example, in Remington: The Science and Practice of Pharmacy 21st ed., Lippincott Williams & Wilkins, 2005 (incorporated herein by reference in its entirety).

[0780] In some embodiments, the compositions (e.g., vaccines) are administered to humans, human patients or subjects. For the purposes of the present disclosure, the phrase “active ingredient” generally refers to the polynucleotides contained in the compositions described herein, for example, RNA polynucleotides (e.g., mRNA polynucleotides) encoding antigenic polypeptides.

[0781] Formulations of the compositions described herein may be prepared by any method known or hereafter developed in the art of pharmacology. In general, such preparatory methods include the step of bringing the active ingredient (e.g., mRNA polynucleotide) into association with an excipient and/or one or more other accessory ingredients, and then, if necessary and/or desirable, dividing, shaping and/or packaging the product into a desired single- or multi-dose unit.

[0782] Relative amounts of the active ingredient, the pharmaceutically acceptable excipient, and/or any additional ingredients in a pharmaceutical composition in accordance with the disclosure will vary, depending upon the identity, size, and/or condition of the subject treated and further depending upon the route by which the composition is to be administered. By way of example, the composition may comprise between 0.1% and 100%, e.g., between 0.5 and 50%, between 1-30%, between 5-80%, at least 80% (w/w) active ingredient.

[0783] The compositions (e.g., vaccines) can be formulated using one or more excipients to: (1) increase stability; (2) increase cell transfection; (3) permit the sustained or delayed release (e.g., from a depot formulation); (4) alter the biodistribution (e.g., target to specific tissues or cell types); (5) increase the translation of encoded protein in vivo; and/or (6) alter the release profile of encoded protein (antigen) in vivo. In addition to traditional excipients such as any and all solvents, dispersion media, diluents, or other liquid vehicles, dispersion or suspension aids, surface active agents, isotonic agents, thickening or emulsifying agents, preservatives, excipients can include, without limitation, lipidoids, liposomes, lipid nanoparticles, polymers, lipoplexes, core-shell nanoparticles, peptides, proteins, cells transfected with RNA (e.g. mRNA) (e.g., for transplantation into a subject), hyaluronidase, nanoparticle mimics and combinations thereof.

### Examples

[0784] The following examples are set forth below to illustrate the compounds, compositions, methods, and results according to the disclosed subject matter. These examples are not intended to be inclusive of all aspects of the subject matter disclosed herein, but rather to illustrate representative methods and results. These examples are not intended to exclude equivalents and variations of the present invention which are apparent to one skilled in the art.

[0785] Described is a platform for generating universal vaccines by eliciting antibodies and T cell-immunity against pathogenic infections.

### Example 1: Universal COVID-19 mRNA Vaccine with Formulation of Lipid Nanoparticles (LNP)

[0786] The novel coronavirus, SARS-COV-2 that causes COVID-19 illness, has only recently emerged and has rapidly become a global public health emergency. According to World Health Organization, as of Jun. 1, 2022, there are more than 526 million confirmed cases worldwide with greater than 6 million confirmed deaths and as of 22 May 2022, almost one billion people in lower-income countries remain unvaccinated. All viruses, including SARS-COV-2, the virus that causes COVID-19, change over time and some changes may affect the pathological properties such as virus's spreads and disease severity or the performance of vaccines, therapeutic medicines, diagnostic tools, or other public health and social measures. Currently, there are two variants of concern (VOC). One is delta variant and the other is omicron which includes BA.1, BA.2, BA.3, BA.4, BA.5 and descendent lineages. One of the possible scenarios in the near future is that SARS-COV-2 variants emerge repeatedly with the ability to escape vaccine immunity, so that only adapted novel vaccines for multiple rounds of population reimmunization in pursuit of national control. However, many countries struggle with repeated waves and vaccines that are not sufficiently effective against newly circulating viral variants, Therefore, COVID-19 vaccine development should be conducted continuously in world-wide.

[0787] We recently developed a new universal mRNA vaccine, PanCOVAX, which is a mRNA vaccine which contains two mRNAs encoding full-length spike glycoprotein and multiple T cell epitopes (MTEs), respectively, both of which are formulated with T1-LNP to form a vaccine, which will generate humoral and cellular immune responses, including neutralizing antibodies and T cell responses. The mRNA encoding spike will elicit neutralizing antibodies, while the mRNA encoding the MTEs will activate T cells. These T cells can efficiently recognize and eliminate virus infected cells, which is particular important when the antibodies lost their neutralizing ability to new variants. The MTEs in the PANCOVAX vaccine contains hundreds of T cell epitopes derived from conserved region of SARS-COV-2 genome, and these T cell epitopes are unchanged across all variants, also many of them are conserved in other member of coronavirus. Thus, our vaccine will generate humoral immune responses and broad T cell responses and represents a novel safer and universal vaccine against COVID-19, SARS, and other coronaviruses

### Materials and Methods

### Reagents

[0788] Plasmid construct PUC-DVS, PUC-MTE and PUC-OVS were synthesized by GenScript. The sequences are listed in the Table 1, SEQ ID NO: 1, 2, 9 or 10.

[0789] DVS and MTE mRNAs were made by Honggene Biotech (DVSAC24B1B &MTEAC24BIB). OVS was made by Jane Qin by following ARV_SOP_1. Lipids used for lipid nanoparticles fabrication were ionizable lipid Octanoic acid, 8-[(2-hydroxyethyl) [6-oxo-6-(undecyloxy) hexyl]amino]-, 1-octylnonyl ester was purchased from Broadpharm (BP-25499), helper lipid DSPC (850365C-1g), cholesterol (700100P), and DMG-PEG2000 (880151P-1g) were purchased from Avanti Polar Lipids.

### Antibodies for Western Blot

[0790] 1.SARS-COV/SARS-COV-2 Spike Protein S2 Monoclonal Antibody for primary antibody was purchased from Thermofisher, (Product #MA5-35946)
[0791] 2. Goat anti-Mouse IgG (H+L) secondary antibody HRP was purchased from Invitrogen, (Ref #62-6520)
[0792] 3. Anti-beta-Actin HRP Antibody for protein loading control was purchased from Santa Cruz Biotechnology, (sc-47778 HRP)

[0793] Following Antibodies were used in Flow cytometry: CD45-AF750 (eBioscience, Cat #47-0451-82, clone 30-F11), CD3-AF700 (Biolegend, Cat #100216, clone 17A2), CD4-FITC (Biolegend, Cat #100406, clone GK1.5), CD8a-PerCP (Biolegend, Cat #100734, clone 53-6.7), CD44-PE/Cy7 (Biolegend, Cat #103030, clone 1M7), CD62L-BV605 (Biolegend, Cat #104438, clone MEL-14), IFNg-PB (Biolegend, Cat #505818, clone XMG1.2), TNFa-APC (eBioscience, Cat #17-7321-82, clone MP6-XT22).

[0794] MTE overlapping peptides were synthesized by GenScript as shown in Table 2.

Formulation of DVS, OVS or/and MTE with ARV L001 LNP

[0795] The formulations were prepared by mixing lipids in organic phase with an aqueous phase containing mRNA, using a Nanoassemblr Ignite microfluidic device, mRNA was dissolved in 100 mM citrate buffer (pH 4.0). Lipids were dissolved in ethanol. The molar percentage ratio for the constituent lipids is 50% SM-102 (8-| (2-hydroxyethyl) |6-oxo-6-(undecyloxy)hexyl]amino]-octanoic acid, 1-octylnonyl ester) 10% DSPC (1,2-distearoyl-sn-glycero-3-phosphocholine, 38.5% cholesterol, and 1.5% DMG-PEG (1,2-dimyristoyl-rac-glycero-3-methoxypolyethylene glycol-2000). At a flow ratio of 1:3 organic: aqueous phases, the solutions were combined in the microfluidic device (Precision NanoSystems). The total combined flow rate was 12 mL/min, per microfluidics chip. The mixed material was then dialyzed in 20 mM Tris with 8 wt % sucrose for 16 hrs. The particles were concentrated by centrifugation for 30 minutes at 2000 g using Amicon Protein Concentrator PES (30K MWCO). Particle size and zetapotential were determined by Malvern ZEN3600.

In Vitro Delivery mRNA by LNP an In Vitro Potency

[0796] To assess in vitro delivery efficiency, 293T cells are inoculated with LNP formulated indicated mRNA, the expression of Spike proteins were evaluated by Flow cytometry and Western blot.

### Immunization and Serum Collection

[0797] Six- to eight-week-old female BALB/c mice bred and maintained at animal facility in Noble Life Science. Mice were immunized with formulated mRNA by IM as scheduled in the below table.

### Study Schedule:

| | JJ/RM | | | | | | | | | |
|---|---|---|---|---|---|---|---|---|---|---|
| | 22-COV-001 validation of LNP formulation with | | | | | | | | | |
| | Luciferase mRNA in BALB/c mice (Noble Life Science) | | | | | | | | | |
| | | | mRNA | No. | | Injection | | | | |
| | Formu- | | amount | of | Dosing | amount | | Serum | Spleen | Total |
| Group | lation | mRNA | (ug/dose) | mouse | route | (ul) | Injection | collection | collection | mRNA(ug) |
| 1 | PBS | N/A | N/A | 5 | IM | 50 | D 0, D 21 | D 14, D 35 | D 35 | N/A |
| 2 | ARV-L001 | DVS | 1 | 5 | IM | 50 | D 0, D 21 | D 14, D 35 | D 35 | 50 |
| 4 | ARV-L001 | DVS/MTE | 1/1 | 5 | IM | 50 | D 0, D 21 | D 14, D 35 | D 35 | 50/50 |
| 5 | ARV-L001 | DVS/MTE | 5/5 | 5 | IM | 50 | D 0, D 21 | D 14, D 35 | D 35 | 50 |

### Evaluation of Antigen-Specific T Cell Response by ELISPOT

[0798] To assess antigen-specific T cell response in the vaccinated mice, splenocytes from vaccinated mice were evaluated for antigen-specific IFNγ by Enzyme-linked immunospot (ELISPOT). For ELISPOT assays were performed as per ARV SOP. Briefly, 96-well ELISPOT plate (Millipore, Cat #MSIPS4510) was coated with 10 μg/ml IFNγ antibody (Biolegend, Cat #517902, clone AN18) at 4° C. overnight. Splenocytes were plated at 3×105 cells/well and co-cultured with 0.5 μg/ml spike peptides (JPT, Cat #PM-WCPV-S-1) or 2 μg/ml human MTE overlapping peptides (synthesized by Genscript) or concavalin A (0.125 μg/ml) (Sigma, Cat #C5275-5 MG) or medium alone in a total volume of 200 μl/well T cell media for 48 h at 37° C. in 5% CO₂. The plates were incubated with detection antibodies Biotin-IFNγ (Biolegend, Cat #505714, clone R46A2) and Streptavidin-HRP (Biolegend, Cat #405210) at RT for 1-2 hours respectively. The plates were developed with 50 μl/well AEC development solution (BDbiosciences, Cat #551015) for up to 30 min. Color development was stopped by washing under running tap water. After air dried, colored spots were counted using an AID ELISPOT High-Resolution Reader System and AID ELISPOT Software version 3.5 (Autoimmun Diagnostika GmbH).

### ELISA

[0799] The murine antibody response to spike was assessed by indirect ELISA. ELISA plates (Nunc MaxiSorp, Thermofisher, Cat #44-2404-21) were coated with 1 μg/ml recombinant spike protein (Sino Biological Inc, Cat #40591-V08H) overnight and then blocked with 2% BSA in PBS. Serum samples were diluted from 100×, then do 1:5 serial dilution up to 8 wells with 0.2% BSA in PBS. Samples were detected with 1:2000 goat anti-mouse IgG-HRP (Southern Biotech, Cat #1031-05). Reaction was developed with TMB Substrate (Sigma, Cat #T0440-1001) and stopped with TMB Stop Solution (Invitrogen, Cat #SS04). Plates were read (OD450) by using Epoch ELISA reader (BioTek, Winooski, VT).

### Lentivirus Based Pseudovirus Neutralization Assay

[0800] The SARS-COV-2 pseudoviruses expressing a luciferase reporter gene were purchased from Jimmy Lab. To determine the neutralization activity of the antisera from vaccinated mice, HEK293T-hACE2 cells were seeded in 384-well tissue culture plates at a density of 7.5×103 cells per well overnight. Two-fold serial dilutions of heat-inactivated serum samples were prepared and mixed 17.5 μl with 7.5 μl of pseudovirus. The mixture was incubated at 37° C. for 1 h before adding to HEK293T-hACE2 cells. After 48 h, cells were lysed in Steady-Glo Luciferase Assay (Promega) according to the manufacturer's instructions. SARS-COV-2 neutralization titres were defined as the sample dilution at which a 50% reduction in relative light units (IC50) was observed relative to the average of the virus control wells.

### Intracellular Cytokine Staining

[0801] Single cell suspensions were made from spleens. RBC (red blood cells) were lyzed with 1.5 ACK lysis buffer (Lonza, BP10-548E) for 5 minutes and resuspended in RPMI 1640 complete medium. Splenocytes were filtered by 70 μm cell strainers. 200 ul of IM splenocytes were seed into round-bottom 96-well plate (Corning, Cat #3788) and stimulated with 0.5 μg/ml spike peptides (JPT, Cat #PM-WCPV-S-1) or MTE peptides (synthesized by Genscript) or cell activation cocktail (Biolegend, Cat #423302) or medium alone at 37° C. for 1h. Prepare 50 ul BD golgiplug (BD biosciences, Cat #555029) and 35 ul BD golgistop (BD biosciences, Cat #554724) in 1 ml cell culture medium and add 20 ul/well in 96-well plate. Cells were incubated at 37° C. for 4-5 h and then staining with Zombie Aqua Fixable viability dye in PBS for 20 minutes at RT. Cells were then staining with Fc block, CD45-AF750, CD3-AF700, CD4-FITC. CD8a-PercpCy5.5, CD44-PECy7, CD62L-BV605 in FC buffer (PBS supplemented with 2% heated inactivated FBS) at 4° C. for 30 minutes. Cells were fixed and permeabilized with fixation/permeabilization kit (eBioscience, Cat #00-5521-00) according to the manufacturer's instructions. Intracellular staining was performed with cocktail in 1X Permeabilization Buffer containing IFN-γ-PB and TNFa-APC at 4° C. for 1h. Cells were washed twice with Permeabilization Buffer and resuspend in FC buffer.

### Statistics

[0802] Statistical analysis was performed using Prism software. One-way ANOVA was used to compare each group.

### Results

[0803] Results for in vitro transcription of mRNA and in vitro validation of the protein expression are shown in FIGS. 1A-1E. The preparation of LNPs and evaluation of delivery efficiency in vitro is shown in FIGS. 2A-2B. The COVID vaccine described herein elicits robust spike-specific antibody responses in vivo results are shown in FIG. 3A-3D. The vaccine described herein elicits robust spike-, and MTE-specific T cell responses results are shown in FIGS. 4A-4D. Results for dosing studies are shown in FIGS. 5A-5C. The vaccine described elicits robust spike-, and MTE-specific T cell responses as shown in FIGS. 6A-6D.

### CONCLUSION

[0804] The vaccine described herein formulated with DVS and MTE, elicits robust spike specific binding and neutralizing antibody responses in vivo. The vaccine described herein, DVS/MTE, elicits robust spike- and MTE-specific-T cell response, including CD4 and CD8 T cell responses.

### Example 2: HSV-1/-2 mRNA Vaccine Formulated with Lipid Nanoparticles

[0805] The sequences of indicated mRNAs used in HSV-2 vaccine are listed in the Table 1 and the MTE amino acid sequence are listed in the Table 2.

[0806] Synthetizations of HSV mRNA vaccine in vitro. HSV gB, gD, gH, gL, UL19, and MTE mRNAs were synthesized with T7 RNA polymerase in vitro transcription and run on 0.8% MOPS agarose gel see FIG. 11.

[0807] Validation of HSV mRNA vaccine in vitro was performed. HSV mRNA gB (FIG. 12A), gD (FIG. 12B) and gL (FIG. 12C) were transfected into 293T cells with mRNA transfection kit and detected by western blot. HSV mRNA MTE-His was transfected into 293T cells with mRNA transfection kit as shown in FIG. 12D. After 48h, MTE-His protein was concentrated from cell lysis and detected by western blot. HSV mRNA gH-HA (FIG. 12E) and UL-19 (FIG. 12F) were transfected into 293T cells with mRNA transfection kit and detected by flow cytometry.

[0808] Physiochemical characterization of lipid nanoparticle formulation. Size and polydispersity index (PDI) of LNP formulations with indicated mRNA using ARV-L002 (ARV-T1) are shown in FIG. 13A. Encapsulation efficiency of mRNA vaccine of ARV-L002 LNP formulation with indicated mRNA are shown in FIG. 13B.

[0809] HSV mRNA vaccine elicits robust T cell responses and strong antibody responses in BALB/c mice. BALB/c mice were intramuscularly immunized on DO. D21, and D42 with 5 μg of LNP formulated mRNA vaccines (gD-wt, gD, gB/gD, gB/gD+gH/gL and gH/gL+MTE/UL19) as illustrated in FIG. 14A. Mouse serum was collected on D14, D35, and D56, respectively. Mouse spleens were collected on D56. gD specific IgG were detected by ELISA from serum samples results shown in FIG. 14B. Neutralization assays were performed with HSV-2 MS strain in Vero cells by counting plaque results are shown in FIG. 14C. Splenocytes were isolated from mouse spleen, ELISPOT assay was performed results are shown in FIGS. 14D-14E, flow cytometry intracellular staining with stimulation of a UL-19 peptides pool (FIGS. 14E-14F) or gD peptides pool (FIGS. 14D and 14G).

[0810] HSV mRNA vaccines protect mice from HSV-2 challenge. 50% lethal dose (LD50) of HSV2 MS in BALB/c. Female BALB/c mice were injected with 2 mg medroxyprogesterone on D-7 and -3 and challenged intravaginally with different PFU of HSV-2 as illustrated in FIG. 15A. Mouse body weight and survival were recorded after the challenge. Mouse survival curve after challenge is shown in FIG. 15B. The value of LD50 of HSV-2 MS strain in BALB/c mice is shown in FIG. 15C. Female BALB/c mice were intramuscularly immunized on DO and D21 with 5 μg of LNP formulated mRNA vaccines (gB/gD, gB/gD+MTE/UL19, gB/gD+gH/gL+MTE/UL19, and gB/gD+gH/gL+gC/gE+MTE/UL19) as illustrated in FIG. 15D. Mouse serum was collected on D14 and D28. Mice were injected with 2 mg medroxyprogesterone on D35 and 39 and challenged intravaginally with 10+PFU HSV2 MS strain or HSV-1 HF on D42. Vaginal cultures were collected on D44 and 46 to determine the copy number of HSV2 or HSV-1. Mice genital disease, body weight and survival were recorded until D56.

### Example 3: Monkeypox (MPX) mRNA Vaccine with LNP

[0811] The sequences of four mRNAs used in MPX vaccine are listed in the Table 1 (SEQ ID No. 347-350).

### Example 4: Lipid Nanoparticles for Nucleic Acid Delivery

[0812] Lipid nanoparticle (LNP) plays a key role in effectively protecting and delivering nucleic acid to cells for the application of prevention and therapeutics. Despite promising data from ongoing clinical trials, the clinical use of gene medicine requires the discovery and development of more efficient delivery systems. Described herein are nanoparticles for gene and drug delivery applications.

SARS-COV-2 mRNA Lipid Nanoparticles (LNPs).

[0813] Lipid nanoparticle (LNP) formulations were prepared herein using either Target 1 lipid (ionizable lipid) (ARV-L002) (ARV-T1) or commercially available SM-102 lipid (ARV-L001) for comparison. LNP formulations were prepared using lipids dissolved in ethanol at molar ratios of 50:10:38.5:1.5 (ionizable lipid: DSPC: cholesterol: PEG-lipid). The lipid mixture was combined with 100 mM sodium citrate buffer (pH 4.0) containing mRNA at a volume ratio of 3:1 (aqueous: ethanol) using a NanoAssemblr Ignite. Formulations were dialyzed against 10 mM Tris (pH 7.4) with 8% sucrose in Slide-A-Lyzer dialysis cassettes for at least 16 h and concentrated using Amicon ultra-centrifugal filters and then passed through a 0.22 μm filter and stored at 4° C. or −20° C. until use. The size, PDI, and charge were measured by dynamic light scattering while mRNA encapsulation efficiency was measured by Ribogreen assay spectrometrically using λₑₓ=480 nm and λₑₘ=535 nm.

[0814] FIG. 2A shows the particle diameter and polydispersity index (PDI) of the LNPs. FIG. 2B shows the surface charge (zeta potential) and mRNA encapsulation efficiency of ARV-L001 and ARV-L002 LNPs.

### In Vitro Studies

[0815] 293 T cells were transfected with an mRNA encoding a SARS-COV-2 spike protein. FIG. 10 shows the in vitro expression of the spike protein after transfecting cells with 1.0 μg/mL mRNA over time.

[0816] The transfection efficiency was studied by delivering GFP mRNA (1 μg/mL) using LNP deliver into BHK cells. The transfection efficiency was determined after 24 hours by imaging the BHK cells after transfection and analyzing the GFP expression using flow cytometry. The results of the study are shown in FIGS. 8A and 8B.

### In Vivo Studies

[0817] LNPs formulated with indicated ionizable lipids and 1 μg of Luciferase-expressing mRNA were injected intramuscularly. After administration, the luciferase expression was determined by whole body bioluminescence imaging using an IVIS Spectrum in vivo imaging system at 6, 24, 48, and 72 hours, respectively. Results of the in vivo transfection efficiency study of luciferase-expressing mRNA is shown in FIG. 9.

[0818] 1 μg of a vaccine formulated with Target 1 lipid and mRNA encoding full-length spike glycoprotein of SARS-COV-2 (Delta variant) was injected intramuscularly as scheduled. A formulation comprising commercially available lipid SM-102 and mRNA encoding full-length spike glycoprotein of SARS-COV-2 (Delta variant) was prepared and used as comparison. Total Spike-specific total IgG were evaluated on day 14 and 35 after the first immunization results are shown in FIGS. 5A and 5B. Neutralizing antibodies in the serum are evaluated by pseudotyped viruses results are shown in FIG. 5D. Antigen-specific T cell responses were evaluated by Elispot results are shown in FIG. 10. Data was presented as Mean±SD. Statistical comparisons were analyzed using by one-way ANOVA with Tukey's multiple comparison test. *p<0.05, **p<0.01. The results demonstrate efficient elicited immunity in vivo.

### Example 5. FIPV Vaccine Formulated with Lipid Nanoparticles

[0819] Synthetization and formulation of FIPV mRNA vaccine. Linearization of DNA plasmids with BspQI before mRNA in vitro transcription results are shown in FIG. 16. 1,2 indicated before and after digestion respectively. FIPV mRNAs ((Fcov-I-S-wt, Fcov-I-S-2P, Fcov-I-S-2P2Cb, Fcov-I-S-4P and Fcov-II-RBD-MN)) were synthesized and formulated into LNP-mRNA and certified by Novoprotein.

[0820] Validation of FIPV mRNA vaccine in vitro. FIPV Spike mRNAs (Fcov-I-S-2P-HA, Fcov-I-S-4P-HA and Fcov-I-S-2P2Cb-HA) were synthesized with T7 RNA polymerase in vitro transcription and run on 0.8% MOPS agarose gel results are shown in FIG. 17A. FIPV Spike mRNAs were transfected into 293T cells with mRNA transfection kit and detected by western blot results shown in FIG. 17B.

[0821] mRNA with human derived UTR can be efficiently expressed in feline cells. eGFP mRNAs with human derived UTR were transfected into feline cell line FCWF-4cu and human cell line 293T cells with mRNA transfection kit. The expression level of eGFP were detected by Flow cytometry (FIG. 18A-18B) and fluorescence microscope (FIG. 18C).

[0822] Production of Fcov-1 S1 antigen and antibody. Recombinant Fcov-I S1 subunit His tag protein was produced in vitro and detected with His antibody results shown in FIG. 19A. Rabbits were immunized in 4 doses with recombinant Fcov-I S1-His protein see results in FIG. 19B. Serum was collected 3 weeks after immunizations and performed ELISA assay for s1 antibody titers with recombinant Fcov-I S1-His protein.

[0823] FIPV mRNA vaccine elicits robust T cell responses and strong antibody responses in BALB/c mice. BALB/c mice were intramuscularly immunized on DO and D21 with 2 μg of LNP formulated mRNA vaccines (Fcov-I-S-wt, Fcov-I-S-2P, Fcov-I-S-2P2Cb, Fcov-I-S-4P and Fcov-II-RBD-MN) as illustrated in FIG. 20A. Mouse serum was collected on D14 and D35. Mouse spleens were collected on D35. S1 specific IgG was detected by ELISA from serum samples results shown in FIG. 20B. Splenocytes were isolated from mouse spleen and ELISPOT assay was performed with stimulation of a S1 protein as shown in FIG. 20C or N peptides pool as shown in FIG. 20D.

[0824] FIPV mRNA vaccine protect cat from Fcov-I and Fcov-II challenge. Cats were intramuscularly immunized on DO and D21 with 10 ug of LNP formulated mRNA vaccines (Fcov-I-S-2P, Fcov-II-RBD-MN and Fcov-I-S-2P/Fcov-II-RBD-MN) as illustrated in FIG. 21. Cat serum was collected on D14 and D28. Cats were challenged with Fcov-I and Fcov-II virus on D35. Cats body weight and survival were recorded until D49.

### Sequences

[0825] This application is accompanied by a copy of a sequence listing in electronic form (ST.26 text file) having a title size on disk 5.07 MB, which is incorporated by reference in its entirety.

TABLE 1
Sequences of the constructs
Table 1. DNA and Protein Sequences in Constructs

| Protein | SEQ ID NO: | Sequence |
|---|---|---|
| SARS-COV-2 | 321 | MFVFLVLLPLVSSQCVNLRTRTQLPPAYTNSFTRGVYYPDKVFRSSVLHSTQ |
| B.1.617.2 SPIKE | | DLFLPFFSNVTWFHAIHVSGTNGTKRFDNPVLPFNDGVYFASTEKSNIIRGW |
| (Delta Variant (With | | IFGTTLDSKTQSLLIVNNATNVVIKVCEFQFCNDPFLDVYYHKNNKSWMESG |
| two proline | | VYSSANNCTFEYVSQPFLMDLEGKQGNFKNLREFVFKNIDGYFKIYSKHTPI |
| substitutions); Protein | | NLVRDLPQGFSALEPLVDLPIGINITRFQTLLALHRSYLTPGDSSSGWTAGA |
| Sequence | | AAYYVGYLQPRTFLLKYNENGTITDAVDCALDPLSETKCTLKSFTVEKGIYQ |
| | | TSNFRVQPTESIVRFPNITNLCPFGEVFNATRFASVYAWNRKRISNCVADYS |
| | | VLYNSASFSTFKCYGVSPTKLNDLCFTNVYADSFVIRGDEVRQIAPGQTGKI |
| | | ADYNYKLPDDFTGCVIAWNSNNLDSKVGGNYNYRYRLFRKSNLKPFERDIST |
| | | FTYQAGSKPCNGVEGENCYFPLQSYGFQPTNGVGYQPYRVVVISFETTHAPA |
| | | TVCGPKKSTNLVKNKCVNENENGLIGTGVLIESNKKFLPFQQFGRDIADTTD |
| | | AVRDPQTLEILDITPCSFGGVSVITPGTNTSNQVAVLYQGVNCTEVPVAIHA |
| | | DQLTPTWRVYSTGSNVFQTRAGCLIGAEHVNNSYECDIPIGAGICASYQTQT |
| | | NSRRRARSVASQSIIAYTMSLGAENSVAYSNNSIAIPTNFTISVTTEILPVS |
| | | MTKTSVDCTMYICGDSTECSNLLLQYGSFCTQLNRALTGIAVEQDKNTQEVF |
| | | AQVKQIYKTPPIKDFGGFNFSQILPDPSKPSKRSFIEDLLFNKVTLADAGFI |
| | | KQYGDCLGDIAARDLICAQKFNGLTVLPPLLTDEMIAQYTSALLAGTITSGW |
| | | TFGAGAALQIPFAMQMAYRFNGIGVTQNVLYENQKLIANQFNSAIGKIQDSL |
| | | SSTASALGKLQNVVNQNAQALNTLVKQLSSNFGAISSVLNDILSRLDPPEAE |
| | | VQIDRLITGRLQSLQTYVTQQLIRAAEIRASANLAATKMSECVLGQSKRVDF |
| | | CGKGYHLMSFPQSAPHGVVFLHVTYVPAQEKNFTTAPAICHDGKAHFPREGV |
| | | FVSNGTHWFVTQRNFYEPQIISTDNTFVSGNCDVVIGIVNNTVYDPLQPFLD |
| | | SFKEELDKYFKNHTSPDVDLGDISGINASVVNIQKEIDRLNEVAKNLNESLI |
| | | DLQELGKYEQYIKWPWYIWLGFIAGLIAIVMVTIMLCCMTSCCSCLKGCCSC |
| | | GSCCKFDEDDSEPVLKGVKLHYT |
| SARS-COV-2 | 322 | ATGTTCGTGTTCCTGGTGCTGCTGCCCCTGGTGAGCAGCCAGTGCGTGAACC |
| B.1.617.2 SPIKE | | TGCGGACCCGGACCCAGCTGCCACCAGCCTACACCAACAGCTTCACCCGGGG |
| (Delta Variant (With | | CGTCTACTACCCCGACAAGGTGTTCCGGAGCAGCGTCCTGCACAGCACCCAG |
| two proline | | GACCTGTTCCTGCCCTTCTTCAGCAACGTGACCTGGTTCCACGCCATCCACG |
| substitutions); DNA | | TGAGCGGCACCAACGGCACCAAGCGGTTCGACAACCCCGTGCTGCCCTTCAA |
| Sequence | | CGACGGCGTGTACTTCGCCAGCACCGAGAAGAGCAACATCATCCGGGGCTGG |
| | | ATCTTCGGCACCACCCTGGACAGCAAGACCCAGAGCCTGCTGATCGTGAATA |
| | | ACGCCACCAACGTGGTGATCAAGGTGTGCGAGTTCCAGTTCTGCAACGACCC |
| | | CTTCCTGGACGTGTACTACCACAAGAACAACAAGAGCTGGATGGAGAGCGGC |
| | | GTGTACAGCAGCGCCAACAACTGCACCTTCGAGTACGTGAGCCAGCCCTTCC |
| | | TGATGGACCTGGAGGGCAAGCAGGGCAACTTCAAGAACCTGCGGGAGTTCGT |
| | | GTTCAAGAACATCGACGGCTACTTCAAGATCTACAGCAAGCACACCCCAATC |
| | | AACCTGGTGCGGGATCTGCCCCAGGGCTTCTCAGCCCTGGAGCCCCTGGTGG |
| | | ACCTGCCCATCGGCATCAACASCACCCGGTTCCAGACCCTGCTGGCCCTGCA |
| | | CCGGAGCTACCTGACCCCAGGCGACAGCAGCAGCGGGTGGACAGCAGGCGCG |
| | | GCTGCTTACTACGTGGGCTACCTGCAGCCCCGGACCTTCCTGCTGAAGTACA |
| | | ACGAGAACGGCACCATCACCGACGCCGTGGACTGCGCCCTGGACCCTCTGAG |
| | | CGAGACCAAGTGCACCCTGAAGAGCTTCACCGTGGAGAAGGGCATCTACCAG |
| | | ACCAGCAACTTCCGGGTGCAGCCCACCGAGAGCATCGTGCGGTTCCCCAACA |
| | | TCACCAACCTGTGCCCCTTCGGCGAGGTGTTCAACGCCACCCGGTTCGCCAG |
| | | CGTGTACGCCTGGAACCGGAAGCGGATCAGCAACTGCGTGGCCGACTACAGC |
| | | GTGCTGTACAACAGCGCCAGCTTCAGCACCTTCAAGTGCTACGGCGTGAGCC |
| | | CCACCAAGCTGAACGACCTGTGCTTCACCAACGTGTACGCCGACAGCTTCGT |
| | | GATCCGTGGCGACGAGGTGCGGCAGATCGCACCCGGCCAGACAGGCAAGATC |
| | | GCCGACTACAACTACAAGCTGCCCGACGACTTCACCGGCTGCGTGATCGCCT |
| | | GGAACAGCAACAACCTCGACAGCAAGGTGGGCGGCAACTACAACTACCGGTA |
| | | CCGGCTGTTCCGGAAGAGCAACCTGAAGCCCTTCGAGCGGGACATCAGCACC |
| | | GAGATCTACCAAGCCGGCTCCAAGCCTTGCAACGGCGTGGAGGGCTTCAACT |
| | | GCTACTTCCCTCTGCAGAGCTACGGCTTCCAGCCCACCAACGGCGTGGGCTA |
| | | CCAGCCCTACCGGGTGGTGGTGCTGAGCTTCGAGCTGCTGCACGCCCCAGCC |
| | | ACCGTGTGTGGCCCCAAGAAGAGCACCAACCTGGTGAAGAACAAGTGCGTGA |
| | | ACTTCAACTTCAACGGCCTTACCGGCACCGGCGTGCTGACCGAGAGCAACAA |
| | | GAAATTCCTGCCCTTTCAGCAGTTCGGCCGGGACATCGCCGACACCACCGAC |
| | | GCTGTGCGGGATCCCCAGACCCTGGAGATCCTGGACATCACCCCTTGCAGCT |
| | | TCGGCGGCGTGAGCGTGATCACCCCAGGCACCAACACCAGCAACCAGGTGGC |
| | | CGTGCTGTACCAGGGCGTGAACTGCACCGAGGTGCCCGTGGCCATCCACGCC |
| | | GACCAGCTGACACCCACCTGGCGGGTCTACAGCACCGGCAGCAACGTGTTCC |
| | | AGACCCGGGCCGGTTGCCTGATCGGCGCCGAGCACGTGAACAACAGCTACGA |
| | | GTGCGACATCCCCATCGGCGCCGGCATCTGTGCCAGCTACCAGACCCAGACC |
| | | AATTCACGGCGGAGGGCAAGGAGCGTGGCCAGCCAGAGCATCATCGCCTACA |
| | | CCATGAGCCTGGGCGCCGAGAACAGCGTGGCCTACAGCAACAACAGCATCGC |
| | | CATCCCCACCAACTTCACCATCAGCGTGACCACCGAGATTCTGCCCGTGAGC |
| | | ATGACCAAGACCAGCGTGGACTGCACCATGTACATCTGCGGCGACAGCACCG |
| | | AGTGCAGCAACCTGCTGCTGCAGTACGGCAGCTTCTGCACCCAGCTGAACCG |
| | | GGCCCTGACCGGCATCGCCGTGGAGCAGGACAAGAACACCCAGGAGGTGTTC |
| | | GCCCAGGTGAAGCAGATCTACAAGACCCCTCCCATCAAGGACTTCGGCGGCT |
| | | TCAACTTCAGCCAGATCCTGCCCGACCCCAGCAAGCCCAGCAAGCGGAGCTT |
| | | CATCGAGGACCTGCTGTTCAACAAGGTGACCCTAGCCGACGCCGGCTTCATC |
| | | AAGCAGTACGGCGACTGCCTCGGCGACATAGCCGCCCGGGACCTGATCTGCG |
| | | CCCAGAAGTTCAACGGCCTGACCGTGCTGCCTCCCCTGCTGACCGACGAGAT |
| | | GATCGCCCAGTACACCAGCGCCCTGTTAGCCGGAACCATCACCAGCGGCTGG |
| | | ACTTTCGGCGCTGGAGCCGCTCTGCAGATCCCCTTCGCCATGCAGATGGCCT |
| | | ACCGGTTCAACGGCATCGGCGTGACCCAGAACGTGCTGTACGAGAACCAGAA |
| | | GCTGATCGCCAACCAGTTCAACAGCGCCATCGGCAAGATCCAGGACAGCCTG |
| | | AGCAGCACCGCTAGCGCCCTGGGCAAGCTGCAGAACGTGGTGAACCAGAACG |
| | | CCCAGGCCCTGAACACCCTGGTGAAGCAGCTGAGCAGCAACTTCGGCGCCAT |
| | | CAGCAGCGTGCTGAACGACATCCTGAGCCGGCTGGACCCTCCCGAGGCCGAG |
| | | GTGCAGATCGACCGGCTGATCACTGGCCGGCTGCAGAGCCTGCAGACCTACG |
| | | TGACCCAGCAGCTGATCCGGGCCGCCGAGATTCGGGCCAGCGCCAACCTGGC |
| | | CGCCACCAAGATGAGCGAGTGCGTGCTGGGCCAGAGCAAGCGGGTGGACTTC |
| | | TGCGGCAAGGGCTACCACCTGATGAGCTTTCCCCAGAGCGCACCCCACGGAG |
| | | TGGTGTTCCTGCACGTGACCTACGTGCCCGCCCAGGAGAAGAACTTCACCAC |
| | | CGCCCCAGCCATCTGCCACGACGGCAAGGCCCACTTTCCCCGGGAGGGCGTG |
| | | TTCGTGAGCAACGGCACCCACTGGTTCGTGACCCAGCGGAACTTCTACGAGC |
| | | CCCAGATCATCACCACCGACAACACCTTCGTGAGCGGCAACTGCGACGTGGT |
| | | GATCGGCATCGTGAACAACACCGTGTACGATCCCCTGCAGCCCGAGCTGGAC |
| | | AGCTTCAAGGAGGAGCTGGACAAGTACTTCAAGAATCACACCAGCCCCGACG |
| | | TGGACCTGGGCGACATCAGCGGCATCAACGCCAGCGTGGTGAACATCCAGAA |
| | | GGAGATCGATCGGCTGAACGAGGTGGCCAAGAACCTGAACGAGAGCCTGATC |
| | | GACCTGCAGGAGCTGGGCAAGTACGAGCAGTACATCAAGTGGCCCTGGTACA |
| | | TCTGGCTGGGCTTCATCGCCGGCCTGATCGCCATCGTGATGGTGACCATCAT |
| | | GCTGTGCTGCATGACCAGCTGCTGCAGCTGCCTGAAGGGCTGTTGCAGCTGC |
| | | GGCAGCTGCTGCAAGTTCGACGAGGACGACAGCGAGCCCGTGCTGAAGGGCG |
| | | TGAAGCTGCACTACACC |
| 5′ UTR; DNA | 323 | GGAAATAAGAGAGAAAAGAAGAGTAAGAAGAAATATAAGACCCCGGCGCCGC |
| sequence | | CACC |
| 3′ UTR and PolyA; | 324 | GCTGGAGCCTCGGTGGCCTAGCTTCTTGCCCCTTGGGCCTCCCCCCAGCCCC |
| DNA sequence | | TCCTCCCCTTCCTGCACCCGTACCCCCGTGGTCTTTGAATAAAGTCTGAGTG |
| | | GGCGGCAaaaaaaaaaaaaaaaaaaaaaaaaaaaaagcatatgactaaaaaa |
| | | aaaaaaaaaaaa |
| SARS-COV-2 | 325 | MFVFLVLLPLVSSQCVNLTTRTQLPPAYTNSFTRGVYYPDKVFRSSVLHSTQ |
| B.1.1.529 SPIKE | | DLFLPFFSNVTWFHVISGTNGTKRFDNPVLPFNDGVYFASIEKSNIIRGWIF |
| (Omicron Variant | | GTTLDSKTQSLLIVNNATNVVIKVCEFQFCNDPFLDHKNNKSWMESEFRVYS |
| (With two proline | | SANNCTFEYVSQPFLMDLEGKQGNFKNLREFVFKNIDGYFKIYSKHTPIIVR |
| substitutions); Protein | | EPEDLPQGESALEPLVDLPIGINITRFQTLLALHRSYLTPGDSSSGWTAGAA |
| Sequence | | AYYVGYLQPRTFLLKYNENGTITDAVDCALDPLSETKCTLKSFTVEKGIYQT |
| | | SNFRVQPTESIVRFPNITNLCPFDEVFNATRFASVYAWNRKRISNCVADYSV |
| | | LYNIAPFSTFKCYGVSPTKLNDLCFTNVYADSFVIRGDEVRQIAPGQTGNIA |
| | | DYNYKLPDDFTGCVIAWNSNKLDSKVSGNYNYLYRLERKSNLKPFERDISTE |
| | | IYQAGNKPCNGVAGFNCYFPLRSYSFRPTYGVGYQPYRVVVLSFELLHAPAT |
| | | VCGPKKSTNLVKNKCVNFNFNGLKGTGVLTESNKKFLPFQQFGRDIADTTDA |
| | | VRDPQTLEILDITPCSFGGVSVITPGTNTSNQVAVLYQGVNCTEVPVAIHAD |
| | | QLTPTWRVYSTGSNVFQTRAGCLIGAEYVNNSYECDIPIGAGICASYQTQTK |
| | | SHRRARSVASQSIIAYTMSLGAENSVAYSNNSIAIPTNFTISVTTEILPVSM |
| | | TKTSVDCTMYICGDSTECSNLLLQYGSFCTQLKRALTGIAVEQDKNTQEVFA |
| | | QVKQIYKTPPIKYFGGFNFSQILPDPSKPSKRSFIEDLLFNKVTLADAGFIK |
| | | QYGDCLGDIAARDLICAQKFKGLTVLPPLLIDEMIAQYTSALLAGTITSGWT |
| | | FGAGAALQIPFAMQMAYRFNGIGVTQNVLYENQKLIANQFNSAIGKIQDSLS |
| | | STASALGKLQDVVNHNAQALNTLVKQLSSKFGAISSVLNDELSRLDPPEAEV |
| | | QIDRLITGRLQSLQTYVTQQLIRAAEIRASANLAATKMSECVLGQSKRVDFC |
| | | GKGYHLMSFPQSAPHGVVFLHVTYVPAQEKNFTTAPAICHDGKAHFPREGVF |
| | | VSNGTHWFVTQRNFYEPQIITIDNTFVSGNCDVVIGIVNNTVYDPLQPFLDS |
| | | FKEELDKYFKNHTSPDVDLGDISGINASVVNIQKEIDRLNEVAKNLNESLID |
| | | LQELGKYEQYIKWPWYIWLGFTAGLIAIVMVTIMLCCMTSCCSCLKGCCSCG |
| | | SCCKFDEDDSEPVLKGVKLHYT |
| SARS-COV-2 | 326 | ATGTTCGTGTTCCTGGTGCTGCTGCCCCTGGTGAGCAGCCAGTGCGTGAACC |
| B.1.1.529 SPIKE | | TGACCACCCGGACCCAGCTGCCACCAGCCTACACCAACAGCTTCACCCGGGG |
| (Omicron Variant | | CGTCTACTACCCCGACAAGGTGTTCCGGAGCAGCGTCCTGCACAGCACCCAG |
| (With two proline | | GACCTGTTCCTGCCCTTCTTCAGCAACGTGACCTGGTTCCACGtCATCAGCG |
| substitutions); DNA | | GCACCAACGGCACCAAGCGGTTCGACAACCCCGTGCTGCCCTTCAACGACGG |
| Sequence | | CGTGTACTTCGCCAGCAtCGAGAAGAGCAACATCATCCGGGGCTGGATCTTC |
| | | GGCACCACCCTGGACAGCAAGACCCAGAGCCTGCTGATCGTGAATAACGCCA |
| | | CCAACGTGGTGATCAAGGTGTGCGAGTTCCAGTTCTGCAACGACCCCTTCCT |
| | | GGaCCACAAGAACAACAAGAGCTGGATGGAGAGCGAGTTCCGGGTGTACAGC |
| | | AGCGCCAACAACTGCACCTTCGAGTACGTGAGCCAGCCCTTCCTGATGGACC |
| | | TGGAGGGCAAGCAGGGCAACTTCAAGAACCTGCGGGAGTTCGTGTTCAAGAA |
| | | CATCGACGGCTACTTCAAGATCTACAGCAAGCACACCCCAATCatcGTGCGG |
| | | GAGCCAGAAGATCTGCCCCAGGGCTTCTCAGCCCTGGAGCCCCTGGTGGACC |
| | | TGCCCATCGGCATCAACATCACCCGGTTCCAGACCCTGCTGGCCCTGCACCG |
| | | GAGCTACCTGACCCCAGGCGACAGCAGCAGCGGGTGGACAGCAGGCGCGGCT |
| | | GCTTACTACGTGGGCTACCTGCAGCCCCGGACCTTCCTGCTGAAGTACAACG |
| | | AGAACGGCACCATCACCGACGCCGTGGACTGCGCCCTGGACCCTCTGAGCGA |
| | | GACCAAGTGCACCCTGAAGAGCTTCACCGTGGAGAAGGGCATCTACCAGACC |
| | | AGCAACTTCCGGGTGCAGCCCACCGAGAGCATCGTGCGGTTCCCCAACATCA |
| | | CCAACCTGTGCCCCTTCGaCGAGGTGTTCAACGCCACCCGGTTCGCCAGCGT |
| | | GTACGCCTGGAACCGGAAGCGGATCAGCAACTGCGTGGCCGACTACAGCGTG |
| | | CTGTACAACAtCGCCccCTTCAGCACCTTCAAGTGCTACGGCGTGAGCCCCA |
| | | CCAAGCTGAACGACCTGTGCTTCACCAACGTGTACGCCGACAGCTTCGTGAT |
| | | CCGTGGCGACGAGGTGCGGCAGATCGCACCCGGCCAGACAGGCAAcATCGCC |
| | | GACTACAACTACAAGCTGCCCGACGACTTCACCGGCTGCGTGATCGCCTGGA |
| | | ACAGCAACAAgCTCGACAGCAAGGTGaGCGGCAACTACAACTACCTGTACCG |
| | | GCTGTTCCGGAAGAGCAACCTGAAGCCCTTCGAGCGGGACATCAGCACCGAG |
| | | ATCTACCAAGCCGGCaaCAagCCTTGCAACGGCGTGGGGGGCTTCAACTGCT |
| | | ACTTCCCTCTGCgGAGCTACaGCTTCCgGCCCACCtACGGCGTGGGCTACCA |
| | | GCCCTACCGGGTGGTGGTGCTGAGCTTCGAGCTGCTGCACGCCCCAGCCACC |
| | | GTGTGTGGCCCCAAGAAGAGCACCAACCTGGTGAAGAACAAGTGCGTGAACT |
| | | TCAACTTCAACGGCCTTAagGGCACCGGCGTGCTGACCGAGAGCAACAAGAA |
| | | ATTCCTGCCCTTTCAGCAGTTCGGCCGGGACATCGCCGACACCACCGACGCT |
| | | GTGCGGGATCCCCAGACCCTGGAGATCCTGGACATCACCCCTTGCAGCTTCG |
| | | GCGGCGTGAGCGTGATCACCCCAGGCACCAACACCAGCAACCAGGTGGCCGT |
| | | GCTGTACCAGGgCGTGAACTGCACCGAGGTGCCCGTGGCCATCCACGCCGAC |
| | | CAGCTGACACCCACCTGGCGGGTCTACAGCACCGGCAGCAACGTGTTCCAGA |
| | | CCCGGGCCGGTTGCCTGATCGGCGCCGAGtACGTGAACAACAGCTACGAGTG |
| | | CGACATCCCCATCGGCGCCGGCATCTGTGCCAGCTACCAGACCCAGACCAAg |
| | | TCACaCCGGAGGGCAAGGAGCGTGGCCAGCCAGAGCATCATCGCCTACACCA |
| | | TGAGCCTGGGCGCCGAGAACAGCGTGGCCTACAGCAACAACAGCATCGCCAT |
| | | CCCCACCAACTTCACCATCAGCGTGACCACCGAGATTCTGCCCGTGAGCATG |
| | | ACCAAGACCAGCGTGGACTGCACCATGTACATCTGCGGCGACAGCACCGAGT |
| | | GCAGCAACCTGCTGCTGCAGTACGGCAGCTTCTGCACCCAGCTGAAgCGGGC |
| | | CCTGACCGGCATCGCCGTGGAGCAGGACAAGAACACCCAGGAGGTGTTCGCC |
| | | CAGGTGAAGCAGATCTACAAGACCCCTCCCATCAAGtACTTCGGCGGCTTCA |
| | | ACTTCAGCCAGATCCTGCCCGACCCCAGCAAGCCCAGCAAGCGGAGCTTCAT |
| | | CGAGGACCTGCTGTTCAACAAGGTGACCCTAGCCGACGCCGGCTTCATCAAG |
| | | CAGTACGGCGACTGCCTCGGCGACATAGCCGCCCGGGACCTGATCTGCGCCC |
| | | AGAAGTTCAAgGGCCTGACCGTGCTGCCTCCCCTGCTGACCGACGAGATGAT |
| | | CGCCCAGTACACCAGCGCCCTGTTAGCCGGAACCATCACCAGCGGCTGGACT |
| | | TTCGGCGCTGGAGCCGCTCTGCAGATCCCCTTCGCCATGCAGATGGCCTACC |
| | | GGTTCAACGGCATCGGCGTGACCCAGAACGTGCTGTACGAGAACCAGAAGCT |
| | | GATCGCCAACCAGTTCAACAGCGCCATCGGCAAGATCCAGGACAGCCTGAGC |
| | | AGCACCGCTAGCGCCCTGGGCAAGCTGCAGGACGTGGTGAACCACAACGCCC |
| | | AGGCCCTGAACACCCTGGTGAAGCAGCTGAGCAGCAAgTTCGGCGCCATCAG |
| | | CAGCGTGCTGAACGACATCCTGAGCCGGCTGGACCCTCCCGAGGCCGAGGTG |
| | | CAGATCGACCGGCTGATCACTGGCCGGCTGCAGAGCCTGCAGACCTACGTGA |
| | | CCCAGCAGCTGATCCGGGCCGCCGAGATTCGGGCCAGCGCCAACCTGGCCGC |
| | | CACCAAGATGAGCGAGTGCGTGCTGGGCCAGAGCAAGCGGGTGGACTTCTGC |
| | | GGCAAGGGCTACCACCTGATGAGCTTTCCCCAGAGCGCACCCCACGGAGTGG |
| | | TGTTCCTGCACGTGACCTACGTGCCCGCCCAGGAGAAGAACTTCACCACCGC |
| | | CCCAGCCATCTGCCACGACGGCAAGGCCCACTTTCCCCGGGAGGGCGTGTTC |
| | | GTGAGCAACGGCACCCACTGGTTCGTGACCCAGCGGAACTTCTACGAGCCCC |
| | | AGATCATCACCACCGACAACACCTTCGTGAGCGGCAACTGCGACGTGGTGAT |
| | | CGGCATCGTGAACAACACCGTGTACGATCCCCTGCAGCCCGAGCTGGACAGC |
| | | TTCAAGGAGGAGCTGGACAAGTACTTCAAGAATCACACCAGCCCCGACGTGG |
| | | ACCTGGGCGACATCAGCGGCATCAACGCCAGCGTGGTGAACATCCAGAAGGA |
| | | GATCGATCGGCTGAACGAGGTGGCCAAGAACCTGAACGAGAGCCTGATCGAC |
| | | CTGCAGGAGCTGGGCAAGTACGAGCAGTACATCAAGTGGCCCTGGTACATCT |
| | | GGCTGGGCTTCATCGCCGGCCTGATCGCCATCGTGATGGTGACCATCATGCT |
| | | GTGCTGCATGACCAGCTGCTGCAGCTGCCTGAAGGGCTGTTGCAGCTGCGGC |
| | | AGCTGCTGCAAGTTCGACGAGGACGACAGCGAGCCCGTGCTGAAGGGCGTGA |
| | | AGCTGCACTACACC |
| SARS-COV-2 BA.2 | 327 | MFVFLVLLPLVSSQCVNLITRTQSYTNSFTRGVYYPDKVFRSSVLHSTQDLF |
| SPIKE (Omicron | | LPFFSNVTWFHAIHVSGTNGTKRFDNPVLPFNDGVYFASTEKSNIIRGWIFG |
| BA.2 Variant (With | | TTLDSKTQSLLIVNNATNVVIKVCEFQFCNDPFLDVYYHKNNKSWMESEFRV |
| two proline | | YSSANNCTFEYVSQPFLMDLEGKQGNFKNLREFVFKNTDGYFKTYSKHTPTN |
| substitutions); Protein | | LGRDLPQGFSALEPLVDLPIGINITRFQTLLALHRSYLTPGDSSSGWTAGAA |
| Sequence | | AYYVGYLQPRTFLLKYNENGTITDAVDCALDPLSETKCTLKSFTVEKGIYQT |
| | | SNFRVQPTESIVRFPNITNLCPFDEVFNATRFASVYAWNRKRISNCVADYSV |
| | | LYNFAPFFAFKCYGVSPTKLNDLCFTNVYADSFVIRGNEVSQIAPGQTGNIA |
| | | DYNYKLPDDFTGCVIAWNSNKLDSKVGGNYNYLYRLFRKSNLKPFERDISTE |
| | | IYQAGNKPCNGVAGFNCYFPLRSYGFRPTYGVGHQPYRVVVLSFELLHAPAT |
| | | VCGPKKSTNLVKNKCVNFNFNGLTGTGVLTESNKKFLPFQQFGRDIADTTDA |
| | | VRDPQTLEILDITPCSFGGVSVITPGTNTSNQVAVLYQGVNCTEVPVAIHAD |
| | | QLTPTWRVYSTGSNVFQTRAGCLIGAEYVNNSYECDIPIGAGICASYQTQTK |
| | | SHRRARSVASQSIIAYTMSLGAENSVAYSNNSIAIPTNFTISVTTEILPVSM |
| | | TKTSVDCTMYICGDSTECSNLLLQYGSFCTQLKRALTGIAVEQDKNTQEVFA |
| | | QVKQIYKTPPIKYFGGFNFSQILPDPSKPSKRSFIEDLLFNKVTLADAGFIK |
| | | QYGDCLGDIAARDLICAQKFNGLTVLPPLLIDEMIAQYTSALLAGTITSGWT |
| | | FGAGAALQIPFAMQMAYRFNGIGVTQNVLYENQKLIANQFNSAIGKIQDSLS |
| | | STASALGKLQDVVNHNAQALNTLVKQLSSKFGAISSVLNDILSRLDPPEAEV |
| | | QIDRLITGRLQSLQYTVTQQLIRAAEIRASANLAATKMSECVLGQSKRVDFC |
| | | GKGYHLMSFPQSAPHGVVFLHVTYVPAQEKNFTTAPAICHDGKAHFPREGVF |
| | | VSNGTHWFVTQRNFYEPQIITTDNTFVSGNCDVVIGIVNNTVYDPLQPFLDS |
| | | FKEELDKYFKNHTSPDVDLGDISGINASVVNIQKEIDRLNEVAKNLNESLID |
| | | LQELGKYEQYIKWPWYIWLGFIAGLIAIVMVTIMLCCMTSCCSCLKGCCSCG |
| | | SCCKFDEDDSEPVIKGVKTHYT |
| SARS-COV-2 BA.2 | 328 | ATGTTCGTGTTCCTGGTGCTGCTGCCCCTGGTGAGCAGCCAGTGCGTGAACC |
| SPIKE (Omicron | | TGAtCACCCGGACCCAGagcTACACCAACAGCTTCACCCGGGGCGTCTACTA |
| BA.2 Variant (With | | CCCCGACAAGGTGTTCCGGAGCAGCGTCCTGCACAGCACCCAGGACCTGTTC |
| two proline | | CTGCCCTTCTTCAGCAACGTGACCTGGTTCCACGCCATCCACGTGAGCGGCA |
| | | CCAACGGCACCAAGCGGTTCGACAACCCCGTGCTGCCCTTCAACGACGGCGT |
| | | GTACTTCGCCAGCACCGAaAAGAGCAACATCATCCGGGGCTGGATCTTCGGC |
| | | ACCACCCTGGACAGCAAGACCCAGAGCCTGCTGATCGTGAATAACGCCACCA |
| | | ACGTGGTGATCAAGGTGTGCGAGTTCCAGTTCTGCAACGACCCCTTCCTGGa |
| | | CGTGTACTACCACAAGAACAACAAGAGCTGGATGGAGAGCGAGTTCCGGGTG |
| | | TACAGCAGCGCCAACAACTGCACCTTCGAGTACGTGAGCCAGCCCTTCCTGA |
| | | TGGACCTGGAGGGCAAGCAGGGCAACTTCAAGAACCTGCGGGAGTTCGTGTT |
| | | CAAGAACATCGACGGCTACTTCAAGATCTACAGCAAGCACACCCCAATCAAC |
| | | CTGGgcCGGGATCTGCCCCAGGGCTTCTCAGCCCTGGAGCCCCTGGTGGACC |
| | | TGCCCATCGGCATCAACATCACCCGGTTCCAGACCCTGCTGGCCCTGCACCG |
| | | GAGCTACCTGACCCCAGGCGACAGCAGCAGCGGGTGGACAGCAGGCGCGGCT |
| | | GCTTACTACGTGGGCTACCTGCAGCCCCGGACCTTCCTGCTGAAGTACAACG |
| | | AGAACGGCACCATCACCGACGCCGTGGACTGCGCCCTGGACCCTCTGAGCGA |
| | | GACCAAGTGCACCCTCAAGAGCTTCACCGTGGAGAAGGGCATCTACCAGACC |
| | | AGCAACTTCCGGGTGCAGCCCACCGAGAGCATCGTGCGGTTCCCCAACATCA |
| | | CCAACCTGTGCCCCTTCGaCGAGGTGTTCAACGCCACCCGGTTCGCCAGCGT |
| | | GTACGCCTGGAACCGGAAGCGGATCAGCAACTGCGTGGCCGACTACAGCGTG |
| | | CTGTACAACttCGCCCCATTCttCgCCTTCAAGTGCTACGGCGTGAGCCCCA |
| | | CCAAGCTGAACGACCTGTGCTTCACCAACGTGTACGCCGACAGCTTCGTGAT |
| | | CCGTGGCaACGAGGTGagcCAGATCGCACCCGGCCAGACAGGCAAcATCGCC |
| | | GACTACAACTACAAGCTGCCCGACGACTTCACCGGCTGCGTGATCGCCTGGA |
| | | ACAGCAACAAgCTCGACAGCAAGGTGGGCGGCAACTACAACTACCTGTACCG |
| | | GCTGTTCCGaAAGAGCAACCTGAAGCCCTTCGAGCGGGACATCAGCACCGAG |
| | | ATCTACCAAGCCGGCaaCAagCCTTGCAACGGCGTGGccGGCTTCAACTGCT |
| | | ACTTCCCTCTGCgGAGCTACGGCTTCCgGCCCACCtACGGCGTGGGCCACCA |
| | | GCCCTACCGGGTGGTGGTGCTGAGCTTCGAGCTGCTGCACGCCCCAGCCACC |
| | | GTGTGTGGCCCCAAGAAGAGtACCAACCTGGTGAAGAACAAGTGCGTGAACT |
| | | TCAACTTCAACGGCCTTACCGGCACCGGCGTGCTGACCGAGAGCAACAAGAA |
| | | ATTCCTGCCCTTTCAGCAGTTCGGCCGGGACATCGCCGACACCACCGACGCT |
| | | GTGCGGGATCCCCAGACCCTGGAGATCCTGGACATCACCCCTTGCAGCTTCG |
| | | GCGGCGTGAGCGTGATCACCCCAGGCACCAACACCAGCAACCAGGTGGCCGT |
| | | GCTGTACCAGGgCGTGAACTGCACCGAGGTGCCCGTGGCCATCCACGCCGAC |
| | | CAGCTGACACCCACCTGGCGGGTCTACAGCACCGGCAGCAACGTGTTCCAGA |
| | | CCCGGGCCGGTTGCCTGATCGGCGCCGAGtACGTGAACAACAGCTACGAGTG |
| | | CGACATCCCCATCGGCGCCGGCATCTGTGCCAGCTACCAGACCCAGACCAAg |
| | | TCACaCCGGAGGGCAAGGAGCGTGGCCAGCCAGAGCATCATCGCCTACACCA |
| | | TGAGCCTGGGCGCCGAGAACAGCGTGGCCTACAGCAACAACAGCATCGCCAT |
| | | CCCCACCAACTTCACCATCAGCGTGACCACCGAGATTCTGCCCGTGAGCATG |
| | | ACCAAGACCAGCGTGGACTGCACCATGTACATCTGCGGCGACAGCACCGAGT |
| | | GCAGCAACCTGCTGCTGCAGTACGGCAGCTTCTGCACCCAGCTGAAgCGGGC |
| | | CCTGACCGGCATCGCCGTGGAGCAGGACAAGAACACCCAGGAGGTGTTCGCC |
| | | CAGGTGAAGCAGATCTACAAGACCCCTCCCATCAAGtACTTCGGCGGCTTCA |
| | | ACTTCAGCCAGATCCTGCCCGACCCCAGCAAGCCCAGCAAGCGGAGCTTCAT |
| | | CGAGGACCTGCTGTTCAACAAGGTGACCCTAGCCGACGCCGGCTTCATCAAG |
| | | CAGTACGGCGACTGCCTCGGCGACATAGCCGCCCGGGACCTGATCTGCGCCC |
| | | AGAAGTTCAACGGCCTGACCGTGCTGCCTCCCCTGCTGACCGACGAGATGAT |
| | | CGCCCAGTACACCAGCGCCCTGTTAGCCGGAACCATCACCAGCGGCTGGACT |
| | | TTCGGCGCTGGAGCCGCTCTGCAGATCCCCTTCGCCATGCAGATGGCCTACC |
| | | GGTTCAACGGCATCGGCGTGACCCAGAACGTGCTGTACGAGAACCAGAAGCT |
| | | GATCGCCAACCAGTTCAACAGCGCCATCGGCAAGATCCAGGACAGCCTGAGC |
| | | AGCACCGCTAGCGCCCTGGGCAAGCTGCAGGACGTGGTGAACCACAACGCCC |
| | | AGGCCCTGAACACCCTGGTGAAGCAGCTGAGCAGCAAgTTCGGCGCCATCAG |
| | | CAGCGTGCTGAACGACATCCTGAGCCGGCTGGACCCTCCCGAGGCCGAGGTG |
| | | CAGATCGACCGGCTGATCACTGGCCGGCTGCAGAGCCTGCAGACCTACGTGA |
| | | CCCAGCAGCTGATCCGGGCCGCCGAGATTCGGGCCAGCGCCAACCTGGCCGC |
| | | CACCAAGATGAGCGAGTGCGTGCTGGGCCAGAGCAAGCGGGTGGACTTCTGC |
| | | GGCAAGGGCTACCACCTGATGAGCTTTCCCCAGAGCGCACCCCACGGAGTGG |
| | | TGTTCCTGCACGTGACCTACGTGCCCGCCCAGGAGAAGAACTTCACCACCGC |
| | | CCCAGCCATCTGCCACGACGGCAAGGCCCACTTTCCCCGGGAGGGCGTGTTC |
| | | GTGAGCAACGGCACCCACTGGTTCGTGACCCAGCGGAACTTCTACGAGCCCC |
| | | AGATCATCACCACCGACAACACCTTCGTGAGCGGCAACTGCGACGTGGTGAT |
| | | CGGCATCGTGAACAACACCGTGTACGATCCCCTGCAGCCCGAGCTGGACAGC |
| | | TTCAAGGAGGAGCTGGACAAGTACTTCAAGAATCACACCAGCCCCGACGTGG |
| | | ACCTGGGCGACATCAGCGGCASCAACGCCAGCGTGGTGAACATCCAGAAGGA |
| | | GATCGATCGGCTGAACGAGGTGGCCAAGAACCTGAACGAGAGCCTGATCGAC |
| | | CTGCAGGAGCTGGGCAAGTACGAGCAGTACATCAAGTGGCCCTGGTACATCT |
| | | GGCTGGGCTTCATCGCCGGCCTGATCGCCATCGTGATGGTGACCATCATGCT |
| | | GTGCTGCATGACCAGCTGCTGCAGCTGCCTGAAGGGCTGTTGCAGCTGCGGC |
| | | AGCTGCTGCAAGTTCGACGAGGACGACAGCGAGCCCGTGCTGAAGGGCGTGA |
| | | AGCTGCACTACACC |
| ARV-COV-MTE | 329 | MFLALITLATCELYHYQECVRGITEELKKLLEQWNLVIGFLFLTWICLLQFA |
| (SARS-COV-2 Multi- | | YANRNRFLYIIKLIFLWLLWPVTLACFVLAAVYRINWITGGMACLVGLMWLS |
| T-cell-Epitopes); | | YFIASFRLFARTRSMWSFNPETNILLNVPLHGTILTRPLLESELVIGAVILR |
| Protein Sequence | | GHLRIAGHHLGRCDIKDLPKEITVATSRTLSYYKLGASQRVAGDSGFAAYSR |
| | | YRIGNYKLNTDHSSSSDNIALLVPNNTASWFTALTQHGKEDLKFPRGQGVPI |
| | | NTNSSPDDQIGYYRRATRRIRGGDGKMKDLSPRWYFYYLGTGPEAGLPYGGR |
| | | RGPEQTQGNFGDQELIRQGTDYKHWPQIAQFAPSASAFFGMSRIGMEVTPSG |
| | | TWLTYTGAIKLDDKDPNFKDQVILLNKHIDAYKTFPPTEPKKDKKRSKNPLL |
| | | YDANYFLCWHTNCYDYCIPYNSVTSSIVITYALVYFLQSINFVRISGVKDCV |
| | | VLHSYFTSDYYQLYSTQLSTDIGVEHVTFFIYNKIVDEPEEHVQLEQPYVFI |
| | | KRSDARTAPHGSEKSYELQTPFEIKLVCTNYMPYFFTLLLQLMTYRRLISMM |
| | | GFKMNYQVNREQIDGYVMHANYIFWRNT |
| ARV-COV-MTE | 330 | ATGTTCCTGGCCCTCATCACCCTCGCCACGTGCGAGCTGTACCACTACCAGG |
| (SARS-COV-2 Multi- | | AGTGCGTGCGGGGCACCACCGAGGAGCTGAAGAAGCTCCTCGAGCAGTGGAA |
| T-cell-Epitopes); | | CCTGGTGATCGGCTTCCTGTTCCTGACCTGGATCTGCCTGCTGCAGTTCGCC |
| DNA Sequence | | TATGCCAACCGGAACCGGTTCCTGTACATCATCAAGCTGATCTTCCTGTGGC |
| | | TCCTGTGGCCGGTCACCCTGGCCTGCTTCGTGCTCGCCGCCGTGTACCGGAT |
| | | CAACTGGATCACCGGCGGGATGGCCTGCCTGGTGGGGCTGATGTGGCTGAGC |
| | | TACTTCATCGCCAGCTTCCGGCTGTTCGCCCGGACGCGGAGCATGTGGAGCT |
| | | TTAACCCCGAGACCAACATCCTGCTGAACGTCCCCCTGCACGGCACGATCCT |
| | | GACCCGGCCCCTGCTGGAGAGCGAGCTGGTCATCGGCGCGGTGATCCTGCGG |
| | | GGCCACCTGCGGATCGCCGGCCACCACCTGGGCCGGTGCGACATCAAGGACC |
| | | TGCCCAAGGAGATCACCGTCGCCACCAGCCGGACGCTGAGCTACTACAAGCT |
| | | GGGCGCCAGCCAGCGGGTCGCCGGCGACAGCGGGTTCGCCGCCTACAGCCGG |
| | | TACCGGATCGGCAACTACAAGCTGAACACCGACCACAGCAGCAGCAGCGACA |
| | | ACATCGCCCTGCTGGTGCCCAACAACACCGCGTCCTGGTTCACCGCCCTGAC |
| | | CCAGCACGGGAAAGAGGACCTGAAGTTCCCGAGGGGGCAGGGCGTGCCGATC |
| | | AATACTAATAGTAGCCCAGACGACCAGATAGGCTACTACCGGCGGGCCACCA |
| | | GGCGAATTCGCGGGGGAGACGGGAAGATGAAGGACCTGAGTCCCCGGTGGTA |
| | | CTTCTACTACCTGGGCACCGGGCCAGAGGCCGGCCTGCCATACGGCGGCCGC |
| | | CGGGGCCCAGAGCAGACGCAGGGCAACTTCGGCGACCAAGAGCTGATTCGCC |
| | | AGGGCACGGACTACAAGCACTGGCCTCAGATAGCCCAATTCGCCCCCAGCGC |
| | | GAGCGCGTTTTTCGGGATGAGCAGAATAGGGATGGAGGTGACCCCCAGCGGA |
| | | ACGTGGCTCACCTACACCGGCGCGATCAAGTTGGATGACAAAGACCCAAACT |
| | | TCAAAGACCAGGTCATACTGCTTAACAAACATATCGATGCATACAAAACATT |
| | | CCCGCCGACGGAGCCCAAAAAGGACAAGAAGAGAAGCAAAAACCCGCTGCTG |
| | | TACGACGCCAACTACTTCCTGTGCTGGCACACGAACTGCTACGACTACTGCA |
| | | TCCCCTACAACAGCGTTACCAGCAGCATAGTAATCACCTATGCCTTGGTGTA |
| | | CTTCCTGCAAAGCATCAACTTCGTGAGAATCAGCGGCGTGAAGGACTGCGTA |
| | | GTGCTCCACAGCTACTTCACASCCGACTACTACCAGCTGTACAGCACCCAGC |
| | | TGAGCACCGACACCGGCGTGGAGCACGTAACCTTCTTCATATACAACAAAAT |
| | | CGTCGACGAACCCGAGGAGCACGTACAGCTGGAACAGCCATACGTGTTCATA |
| | | AAACGCTCAGACGCAAGGACCGCCCCCCACGGGAGCGAGAAGAGtTACGAGC |
| | | TGCAAACCCCATTCGAGATCAAGCTGGTCTGCACCAACTACATGCCGTACTT |
| | | CTTCACCCTCCTGCTGCAGCTCATGACGTACCGACGACTGATCAGCATGATG |
| | | GGGTTCAAGATGAACTACCAAGTGAACAGAGAGCAGATCGACGGCTACGTCA |
| | | TGCACGCCAACTACATCTTCTGGAGGAACACA |
| 5′ UTR DNA | 331 | AGAATAAACTAGTATTCTTCTGGTCCCCACAGACTCAGAGAGAACCCGCCAC |
| sequence of ARV- | | C |
| COV-MTE; DNA | | |
| sequence | | |
| 3′ UTR and PolyA; | 332 | CTCGAGCTGGTACTGCATGCACGCAATGCTAGCTGCCCCTTTCCCGTCCTGG |
| DNA sequence of | | GTACCCCGAGTCTCCCCCGACCTCGGGTCCCAGGTATGCTCCCACCTCCACC |
| ARV-COV-MTE; | | TGCCCCACTCACCACCTCTGCTAGTTCCAGACACCTCCCAAGCACGCAGCAA |
| DNA sequence | | TGCAGCTCAAAACGCTTAGCCTAGCCACACCCCCACGGGAAACAGCAGTGAT |
| | | TAACCTTTAGCAATAAACGAAAGTTTAACTAAGCTATACTAACCCCAGGGTT |
| | | GGTCAATTTCGTGCCAGCCACACCCTGGAGCTAGCAaaaaaaaaaaaaaaaa |
| | | aaaaaaaaaaaaagcatatgactaaaaaaaaaaaaaaaaaaaaaaaaaaaaa |
| | | aaaaaaaaaaaaaaaaaaaaaaaaaaaaaaaaaaaaaaaaa |
| SARS-COV-2 | 333 | MSDNGPQNQRNALRITFGGPSDSTGSNQNGGARSKQRRPQGLPNNTASWFTA |
| nucleocapsid | | LTQHGKEDLKFPRGQGVPINTNSSPDDQIGYYRRATRRIRGGDGKMKDLSPR |
| phosphoprotein | | WYFYYLGTGPEAGLPYGANKDGIIWVATEGALNTPKDHIGTRNPANNAAIVL |
| (Omicron B.1.1.529 | | QLPQGTTLPKGFYAEGSRGGSQASSRSSSRSRNSSRNSTPGSSKRTSPARMA |
| Variant; Protein | | GNGGDAALALLLLDRLNQLESKMSGKGQQQQGQTVTKKSAAEASKKPRQKRT |
| sequence | | ATKAYNVTQAFGRRGPEQTQGNFGDQELIRQGTDYKHWPQIAQFAPSASAFF |
| | | GMSRIGMEVTPSGTWLTYTGAIKLDDKDPNFKDQVILLNKHIDAYKTFPPTE |
| | | PKKDKKKKADETQALPQRQKKQQTVTLLPAADLDDFSKQLQQSMSRADSTQA |
| SARS-COV-2 | 334 | ATGAGCGACAACGGCCCCCAGAACCAGAGAAACGCCCTGAGAATCACCTTCG |
| nucleocapsid | | GAGGCCCTAGCGACAGCACCGGCTCTAATCAAAATGGAGGCGCCAGAAGCAA |
| phosphoprotein | | GCAGCGGCGGCCTCAGGGCCTGCCTAACAACACCGCCTCTTGGTTCACCGCT |
| (Omicron B.1.1.529 | | CTTACACAACACGGCAAGGAAGATCTGAAGTTCCCCAGAGGACAGGGTGTTC |
| Variant; DNA | | CAATCAACACCAACAGCTCCCCAGACGATCAGATCGGATATTACAGAAGGGC |
| sequence | | CACTAGACGCATCAGAGGCGGCGACGGCAAGATGAAGGACCTGAGCCCTAGA |
| | | TGGTACTTCTACTACCTGGGCACCGGCCCTGAGGCCGGACTGCCGTACGGCG |
| | | CCAACAAGGACGGCATCATCTGGGTGGCCACAGAGGGCGCCCTGAACACACC |
| | | TAAGGACCACATCGGCACCAGAAATCCTGCCAACAACGCCGCCATCGTGCTG |
| | | CAGCTGCCACAGGGCACCACCCTGCCCAAGGGCTTCTACGCCGAGGGCAGCC |
| | | GGGGCGGCAGCCAGGCCAGCAGCAGATCTTCTTCTCGTTCCCGGAACAGCAG |
| | | CCGGAATTCTACACCTGGCTCCTCCAAGCGGACCAGCCCCGCTAGAATGGCC |
| | | GGCAATGGCGGCGATGCCGCTCTGGCCCTGCTGCTGCTCGATAGACTGAACC |
| | | AGCTGGAAAGCAAGATGAGCGGAAAAGGCCAGCAGCAGCAGGGACAGACAGT |
| | | GACCAAGAAAAGCGCTGCAGAAGCCAGCAAAAAACCTAGACAAAAGAGAACA |
| | | GCCACCAAGGCCTACAACGTGACACAGGCTTTTGGCAGACGGGGCCCCGAGC |
| | | AGACCCAGGGCAACTTCGGCGACCAGGAGCTGATCCGGCAGGGTACAGACTA |
| | | CAAACATTGGCCCCAGATCGCCCAGTTCGCCCCTAGCGCCAGCGCCTTCTTC |
| | | GGAATGTCTAGAATCGGCATGGAAGTGACCCCTTCTGGCACATGGCTGACCT |
| | | ACACCGGCGCTATTAAGCTGGATGACAAGGACCCCAACTTCAAGGACCAAGT |
| | | GATCCTGCTGAACAAGCACATCGACGCCTACAAGACCTTTCCACCTACCGAG |
| | | CCTAAGAAGGATAAGAAAAAGAAAGCTGACGAGACACAGGCCCTGCCTCAAA |
| | | GACAGAAGAAGCAGCAAACCGTGACCCTGCTGCCTGCTGCCGATCTGGACGA |
| | | CTTCAGCAAGCAGCTGCAGCAGAGCATGAGCCGGGCCGACAGCACACAGGCC |
| Exemplary ARV- | 335 | MFVFLVLLPLVSSQCVNLITRTQSYTNSFTRGVYYPDKVFRSSVLHSTQDLF |
| COV-BA2SN+; | | LPFFSNVTWFHAIHVSGTNGTKRFDNPVLPFNDGVYFASTEKSNIIRGWIFG |
| Protein sequence | | TTLDSKTQSLLIVNNATNVVIKVCEFQFCNDPFLDVYYHKNNKSWMESEFRV |
| | | YSSANNCTFEYVSQPFLMDLEFKQGNFKNLREFVFKNIDGYFKIYSKHTPIN |
| | | LGRDLPQGFSALEPLVDLPIGINITRFQTLLALHRSYLTPGDSSSGWTAGAA |
| | | AYYVGYLQPRTFLLKYNENGTITDAVDCALDPLSETKCTLKSFTVEKGIYQT |
| | | SNFRVQPTESIVRFPNITNLCPFDEVFNATRFASVYAWNRKRISNCVADYSV |
| | | LYNFAPFFAFKCYGVSPTKLNDLCFTNVYADSFVIRGNEVSQIAPGQTGNIA |
| | | DYNYKLPDDFTGCVIAWNSNKLDSKVGGNYNYLYRLFRKSNLKPFERDISTE |
| | | IYQAGNKPCNGVAGFNCYFPLRSYGFRPTYGVGHQPYRVVVLSFELLHAPAT |
| | | VCGPKKSTNLVKNKCVNFNFNGLTGTGVLTESNKKFLPFQQFGRDIADTTDA |
| | | VRDPQTLEILDITPCSFGGVSVITPGTNTSNQVAVLYQGVNCTEVPVAIHAD |
| | | QLTPTWRVYSTGSNVFQTRAGCLIGAEYVNNSYECDIPIGAGICASYQTQTK |
| | | SHRRARSVASQSIIAYTMSLGAENSVAYSNNSIAIPTNFTISVTTEILPVSM |
| | | TKTSVDCTMYICGDSTECSNLLLQYGSFCTQLKRALTGIAVEQDKNTQEVFA |
| | | QVKQIYKTPPIKYFGGFNFSQILPDPSKPSKRSFIEDLLFNKVTLADAGFIK |
| | | QYGDCLGDIAARDLICAQKFNGLTVLPPLLTDEMIAQYTSALLAGTITSGWT |
| | | FGAGAALQIPFAMQMAYRFNGIGVTQNVLYENQKLIANQFNSAIGKIQDSLS |
| | | STASALGKLQDVVNHNAQALNTLVKQLSSKFGAISSVLNDILSRLDPPEAEV |
| | | QIDRLITGRLQSLQTYVTQQLIRAAEIRASANLAATKMSECVLGQSKRVDFC |
| | | GKGYHLMSFPQSAPHGVVFLHVTYVPAQEKNFTTAPAICHDGKAHFPREGVE |
| | | VSNGTHWFVTQRNFYEPQIITTDNTFVSGNCDVVIGIVNNTVYDPLQPELDS |
| | | FKEELDKYFKNHTSPDVDLGDISGINASVVNIQKEIDRLNEVAKNLNESLID |
| | | LQELGKYEQYIKWPWYIWLGFIAGLIAIVMVTIMLCCMTSCCSCLKGCCSCG |
| | | SCCKFDEDDSEPVLKGVKLHYTATNFSLLKQAGDVEENPGPMSDNGPQNQRN |
| | | ALRITFGGPSDSTGSNQNGGARSKQRRPQGLPNNTASWFTALTQHGKEDLKF |
| | | PRGQGVPINTNSSPDDQIGYYRRATRRIRGGDGKMKDLSPRWYFYYLGTGPE |
| | | AGLPYGANKDGIIWVATEGALNTPKDHIGTRNPANNAAIVLQLPQGTTLPKG |
| | | FYAEGSRGGSQASSRSSSRSRNSSRNSTPGSSKRTSPARMAGNGGDAALALL |
| | | LLDRLNQLESKMSGKGQQQQGQTVTKKSAAEASKKPRQKRTATKAYNVTQAF |
| | | GRRGPEQTQGNFGDQELIRQGTDYKHWPQIAQFAPSASAFFGMSRIGMEVTP |
| | | SGTWLTYTGAIKLDDKDPNFKDQVILLNKHIDAYKTFPPTEPKKDKKKKADE |
| | | TQALPQRQKKQQTVTLLPAADLDDESKQLQQSMSRADSTQAALVYFLQSINF |
| | | VRIRTRSMWSFNPETNILLNVPL |
| Exemplary ARV- | 336 | ATGTTCGTGTTCCTGGTGCTGCTGCCCCTGGTGAGCAGCCAGTGCGTGAACC |
| COV-BA2SN+; DNA | | TGAtCACCCGGACCCAGagcTACACCAACAGCTTCACCCGGGGCGTCTACTA |
| sequence | | CCCCGACAAGGTGTTCCGGAGCAGCGTCCTGCACAGCACCCAGGACCTGTTC |
| | | CTGCCCTTCTTCAGCAACGTGACCTGGTTCCACGCCATCCACGTGAGCGGCA |
| | | CCAACGGCACCAAGCGGTTCGACAACCCCGTGCTGCCCTTCAACGACGGCGT |
| | | GTACTTCGCCAGCACCGAaAAGAGCAACATCATCCGGGGCTGGATCTTCGGC |
| | | ACCACCCTGGACAGCAAGACCCAGAGCCTGCTGATCGTGAATAACGCCACCA |
| | | ACGTGGTGATCAAGGTGTGCGAGTTCCAGTTCTGCAACGACCCCTTCCTGGa |
| | | CGTGTACTACCACAAGAACAACAAGAGCTGGATGGAGAGCGAGTTCCGGGTG |
| | | TACAGCAGCGCCAACAACTGCACCTTCGAGTACGTGAGCCAGCCCTTCCTGA |
| | | TGGACCTGGAGGGCAAGCAGGGCAACTTCAAGAACCTGCGGGAGTTCGTGTT |
| | | CAAGAACATCGACGGCTACTTCAAGATCTACAGCAAGCACACCCCAATCAAC |
| | | CTGGgcCGGGATCTGCCCCAGGGCTTCTCAGCCCTGGAGCCCCTGGTGGACC |
| | | TGCCCATCGGCATCAACATCACCCGGTTCCAGACCCTGCTGGCCCTGCACCG |
| | | GAGCTACCTGACCCCAGGCGACAGCAGCAGCGGGTGGACAGCAGGCGCGGCT |
| | | GCTTACTACGTGGGCTACCTGCAGCCCCGGACCTTCCTGCTGAAGTACAACG |
| | | AGAACGGCACCATCACCGACGCCGTGGACTGCGCCCTGGACCCTCTGAGCGA |
| | | GACCAAGTGCACCCTCAAGAGCTTCACCGTGGAGAAGGGCATCTACCAGACC |
| | | AGCAACTTCCGGGTGCAGCCCACCGAGAGCATCGTGCGGTTCCCCAACATCA |
| | | CCAACCTGTGCCCCTTCGaCGAGGTGTTCAACGCCACCCGGTTCGCCAGCGT |
| | | GTACGCCTGGAACCGGAAGCGGATCAGCAACTGCGTGGCCGACTACAGCGTG |
| | | CTGTACAACttCGCCCCATTCttCgCCTTCAAGTGCTACGGCGTGAGCCCCA |
| | | CCAAGCTGAACGACCTGTGCTTCACCAACGTGTACGCCGACAGCTTCGTGAT |
| | | CCGTGGCaACGAGGTGagcCAGATCGCACCCGGCCAGACAGGCAAcATCGCC |
| | | GACTACAACTACAAGCTGCCCGACGACTTCACCGGCTGCGTGATCGCCTGGA |
| | | ACAGCAACAAgCTCGACAGCAAGGTGGGCGGCAACTACAACTACCTGTACCG |
| | | GCTGTTCCGaAAGAGCAACCTGAAGCCCTTCGAGCGGGACATCAGCACCGAG |
| | | ATCTACCAAGCCGGCaaCAagCCTTGCAACGGCGTGGccGGCTTCAACTGCT |
| | | ACTTCCCTCTGCgGAGCTACGGCTTCCgGCCCACCtACGGCGTGGGCcACCA |
| | | GCCCTACCGGGTGGTGGTGCTGAGCTTCGAGCTGCTGCACGCCCCAGCCACC |
| | | GTGTGTGGCCCCAAGAAGAGtACCAACCTGGTGAAGAACAAGTGCGTGAACT |
| | | TCAACTTCAACGGCCTTACCGGCACCGGCGTGCTGACCGAGAGCAACAAGAA |
| | | ATTCCTGCCCTTTCAGCAGTTCGGCCGGGACATCGCCGACACCACCGACGCT |
| | | GTGCGGGATCCCCAGACCCTGGAGATCCTGGACATCACCCCTTGCAGCTTCG |
| | | GCGGCGTGAGCGTGATCACCCCAGGCACCAACACCAGCAACCAGGTGGCCGT |
| | | GCTGTACCAGGgCGTGAACTGCACCGAGGTGCCCGTGGCCATCCACGCCGAC |
| | | CAGCTGACACCCACCTGGCGGGTCTACAGCACCGGCAGCAACGTGTTCCAGA |
| | | CCCGGGCCGGTTGCCTGATCGGCGCCGAGtACGTGAACAACAGCTACGAGTG |
| | | CGACATCCCCATCGGCGCCGGCATCTGTGCCAGCTACCAGACCCAGACCAAg |
| | | TCACaCCGGAGGGCAAGGAGCGTGGCCAGCCAGAGCATCATCGCCTACACCA |
| | | TGAGCCTGGGCGCCGAGAACAGCGTGGCCTACAGCAACAACAGCATCGCCAT |
| | | CCCCACCAACTTCACCATCAGCGTGACCACCGAGATTCTGCCCGTGAGCATG |
| | | ACCAAGACCAGCGTGGACTGCACCATGTACATCTGCGGCGACAGCACCGAGT |
| | | GCAGCAACCTGCTGCTGCAGTACGGCAGCTTCTGCACCCAGCTGAAgCGGGC |
| | | CCTGACCGGCATCGCCGTGGAGCAGGACAAGAACACCCAGGAGGTGTTCGCC |
| | | CAGGTGAAGCAGATCTACAAGACCCCTCCCATCAAGtACTTCGGCGGCTTCA |
| | | ACTTCAGCCAGATCCTGCCCGACCCCAGCAAGCCCAGCAAGCGGAGCTTCAT |
| | | CGAGGACCTGCTGTTCAACAAGGTGACCCTAGCCGACGCCGGCTTCATCAAG |
| | | CAGTACGGCGACTGCCTCGGCGACATAGCCGCCCGGGACCTGATCTGCGCCC |
| | | AGAAGTTCAACGGCCTGACCGTGCTGCCTCCCCTGCTGACCGACGAGATGAT |
| | | CGCCCAGTACACCAGCGCCCTGTTAGCCGGAACCATCACCAGCGGCTGGACT |
| | | TTCGGCGCTGGAGCCGCTCTGCAGATCCCCTTCGCCATGCAGATGGCCTACC |
| | | GGTTCAACGGCATCGGCGTGACCCAGAACGTGCTGTACGAGAACCAGAAGCT |
| | | GATCGCCAACCAGTTCAACAGCGCCATCGGCAAGATCCAGGACAGCCTGAGC |
| | | AGCACCGCTAGCGCCCTGGGCAAGCTGCAGGACGTGGTGAACCACAACGCCC |
| | | AGGCCCTGAACACCCTGGTGAAGCAGCTGAGCAGCAAqTTCGGCGCCATCAG |
| | | CAGCGTGCTGAACGACATCCTGAGCCGGCTGGACCCTCCCGAGGCCGAGGTG |
| | | CAGATCGACCGGCTGATCACTGGCCGGCTGCAGAGCCTGCAGACCTACGTGA |
| | | CCCAGCAGCTGATCCGGGCCGCCGAGATTCGGGCCAGCGCCAACCTGGCCGC |
| | | CACCAAGATGAGCGAGTGCGTGCTGGGCCAGAGCAAGCGGGTGGACTTCTGC |
| | | GGCAAGGGCTACCACCTGATGAGCTTTCCCCAGAGCGCACCCCACGGAGTGG |
| | | TGTTCCTGCACGTGACCTACGTGCCCGCCCAGGAGAAGAACTTCACCACCGC |
| | | CCCAGCCATCTGCCACGACGGCAAGGCCCACTTTCCCCGGGAGGGCGTGTTC |
| | | GTGAGCAACGGCACCCACTGGTTCGTGACCCAGCGGAACTTCTACGAGCCCC |
| | | AGATCATCACCACCGACAACACCTTCGTGAGCGGCAACTGCGACGTGGTGAT |
| | | CGGCATCGTGAACAACACCGTGTACGATCCCCTGCAGCCCGAGCTGGACAGC |
| | | TTCAAGGAGGAGCTGGACAAGTACTTCAAGAATCACACCAGCCCCGACGTGG |
| | | ACCTGGGCGACATCAGCGGCATCAACGCCAGCGTGGTGAACATCCAGAAGGA |
| | | GATCGATCGGCTGAACGAGGTGGCCAAGAACCTGAACGAGAGCCTGATCGAC |
| | | CTGCAGGAGCTGGGCAAGTACGAGCAGTACATCAAGTGGCCCTGGTACATCT |
| | | GGCTGGGCTTCATCGCCGGCCTGATCGCCATCGTGATGGTGACCATCATGCT |
| | | GTGCTGCATGACCAGCTGCTGCAGCTGCCTGAAGGGCTGTTGCAGCTGCGGC |
| | | AGCTGCTGCAAGTTCGACGAGGACGACAGCGAGCCCGTGCTGAAGGGCGTGA |
| | | AGCTGCACTACACCGCCACAAACTTTAGCCTGCTGAAGCAGGCCGGGGATGT |
| | | CGAGGAAAACCCCGGCCCTATGAGCGACAACGGCCCCCAGAACCAGAGAAAC |
| | | GCCCTGAGAATCACCTTCGGAGGCCCTAGCGACAGCACCGGCTCTAATCAAA |
| | | ATGGAGGCGCCAGAAGCAAGCAGCGGCGGCCTCAGGGCCTGCCTAACAACAC |
| | | CGCCTCTTGGTTCACCGCTCTTACACAACACGGCAAGGAAGATCTGAAGTTC |
| | | CCCAGAGGACAGGGTGTTCCAATCAACACCAACAGCTCCCCAGACGATCAGA |
| | | TCGGATATTACAGAAGGGCCACTAGACGCATCAGAGGCGGCGACGGCAAGAT |
| | | GAAGGACCTGAGCCCTAGATGGTACTTCTACTACCTGGGCACCGGCCCTGAG |
| | | GCCGGACTGCCGTACGGCGCCAACAAGGACGGCATCATCTGGGTGGCCACAG |
| | | AGGGCGCCCTGAACACACCTAAGGACCACATCGGCACCAGAAATCCTGCCAA |
| | | CAACGCCGCCATCGTGCTGCAGCTGCCACAGGGCACCACCCTGCCCAAGGGC |
| | | TTCTACGCCGAGGGCAGCCGGGGCGGCAGCCAGGCCAGCAGCAGATCTTCTT |
| | | CTCGTTCCCGGAACAGCAGCCGGAATTCTACACCTGGCTCCTCCAAGCGGAC |
| | | CAGCCCCGCTAGAATGGCCGGCAATGGCGGCGATGCCGCTCTGGCCCTGCTG |
| | | CTGCTCGATAGACTGAACCAGCTGGAAAGCAAGATGAGCGGAAAAGGCCAGC |
| | | AGCAGCAGGGACAGACAGTGACCAAGAAAAGCGCTGCAGAAGCCAGCAAAAA |
| | | ACCTAGACAAAAGAGAACAGCCACCAAGGCCTACAACGTGACACAGGCTTTT |
| | | GGCAGACGGGGCCCCGAGCAGACCCAGGGCAACTTCGGCGACCAGGAGCTGA |
| | | TCCGGCAGGGTACAGACTACAAACATTGGCCCCAGATCGCCCAGTTCGCCCC |
| | | TAGCGCCAGCGCCTTCTTCGGAATGTCTAGAATCGGCATGGAAGTGACCCCT |
| | | TCTGGCACATGGCTGACCTACACCGGCGCTATTAAGCTGGATGACAAGGACC |
| | | CCAACTTCAAGGACCAAGTGASCCTGCTGAACAAGCACATCGACGCCTACAA |
| | | GACCTTTCCACCTACCGAGCCTAAGAAGGATAAGAAAAAGAAAGCTGACGAG |
| | | ACACAGGCCCTGCCTCAAAGACAGAAGAAGCAGCAAACCGTGACCCTGCTGC |
| | | CTGCTGCCGATCTGGACGACTTCAGCAAGCAGCTGCAGCAGAGCATGAGCCG |
| | | GGCCGACAGCACACAGGCCGCCTTGGTGTACTTCCTGCAAAGCATCAACTTC |
| | | GTGAGAATCCGGACGCGGAGCATGTGGAGCTTTAACCCCGAGACCAACATCC |
| | | TGCTGAACGTCCCCCTG |
| Exemplary P2A | 337 | ATNFSLLKQAGDVEENPGP |
| Protein Sequence | | |
| Exemplary P2ADNA | 338 | GCCACAAACTTTAGCCTGCTGAAGCAGGCCGGGGATGTCGAGGAAAACCCCG |
| Sequence | | GCCCT |
| ARV-HSV-mRNA-1 | 339 | MGPGLWVVMGVLVGVAGGHDTYWTEQIDPWFIHGLGLARTYWRDTNTGRLWL |
| (HSV-2 glycoprotein | | PNTPDASDPQRGRLAPPGELNLTTASVPMLRWYAERFCFVLVTTAEFPRDPG |
| H and glycoprotein | | QLLYIPKTYLLGRPRNASLPELPEAGPTSRPPAEVTQLKGLSHNPGASALLR |
| L); Protein sequence | | SRAWVTFAAAPDREGLTFPRGDDGATERHPDGRRNAPPPGPPAGAPRHPTTN |
| | | LSAIHLHNASVTWLAARGLLRTPGRYVYLSPSASTWPVGVWTTGGLAFGCDA |
| | | ALVRARYGKGFMGLVISMRDSPPAEIIVVPADKTLARVGNPTDENAPAVLPG |
| | | PPAGPRYRVFVLGAPTPADNGSALDALRRVAGYPEESTNYAQYMSRAYAEFL |
| | | GEDPGSGTDARPSLFWRLAGLLASSGFAFVNAAHAHDAIRLSQLLGFLAHSR |
| | | VLAGLAARGAAGCAADSVFLNVSVLDPAARLRLEARLGHLVAAILEREQSLA |
| | | AHALGYQLAFVLDSPAAYGAVAPSAARLIDALYAEFLGGRALTAPMVRRALF |
| | | YATAVLRAPFLAGAPSAEQRERARRGLLITTALCTSDVAAATHADLRAALAR |
| | | TDHQKNLFWLPDHFSPCAASLRFDLAEGGFILDALAMATRSDIPADVMAQQT |
| | | RGVASALTRWAHYNALIRAFVPEATHQCSGPSHNAEPRILVPITHNASYVVT |
| | | HTPLPRGIGYKLTGVDVRRPLFITYLTATCEGHAREIEPKRLVRTENRRDLG |
| | | LVGAVFLRYTPAGEVMSVLLVDTDATQQQLACGPVAGTPNVFSSDVPSVALL |
| | | LFPNGTVIHLLAFDTLPIATIAPGFLAASALGVVMITAALAGILRVVRTCVP |
| | | FLWRREATNFSLLKQAGDVEENPGPMGFVCLFGLVVMGAWGAWGGSQATEYV |
| | | LRSVIAKEVGDILRVPCMRTPADDVSWRYEAPSVIDYARIDGIFLRYHCPGL |
| | | DTFLWDRHAQRAYLVNPFLFAAGFLEDLSHSVEPADTQETTTRRALYKEIRD |
| | | ALGSRKQAVSHAPVRAGCVNFDYSRTRRCVGRRDLRPANTTSTWEPPVSSDD |
| | | EASSQSKPLATQPPVLALSNAPPRRVSPTRGRRRHTRLRRN |
| ARV-HSV-mRNA-1 | 340 | atgggccccggtctgtgggtggtgatgggcgtactggtaggcgttgccgggg |
| (HSV-2 glycoprotein | | gccatgacacgtactggacagagcaaatcgacccgtggttcttgcacggtct |
| H and glycoprotein | | ggggttggcccgcacgtactggcgcgacacaaacaccgggaggctgtggttg |
| L); DNA sequence | | cccaacacccccgacgccagcgacccccagcgcggacgcttggcgcccccgg |
| | | gcgaactcaacctgacaacggcaagcgtgcccatgcttcggtggtacgccga |
| | | gcgcttttgtttcgtgttggtcaccacggccgagtttccacgggaccccggg |
| | | cagctgctttacatcccaaagacctatctgctcggccggccacggaacgcga |
| | | gcctgcccgagcttcccgaggcggggcccacgtccaggccccccgccgaggt |
| | | gacccagctcaagggactgagccacaaccccggcgcctccgcgctgttgagg |
| | | tcccgggcctgggtaacattcgcggccgcgccagaccgcgaggggcttacgt |
| | | tcccgcggggagacgacggggcgaccgagaggcacccggacggccgacgcaa |
| | | cgcaccgcccccggggccgcccgcgggagcgccgaggcatccgacgacgaac |
| | | ctgagcattgcgcatctgcacaacgcgtccgtgacatggctggccgccaggg |
| | | gcctgctacggacaccgggtcggtacgtgtacctctccccgagcgcctcgac |
| | | gtggcccgtgggagtctggacgacgggcgggctggcgttcgggtgcgatgcc |
| | | gcgcttgtgcgcgcgcgatacgggaagggcttcatggggctcgtgatttcca |
| | | tgcgggacagcccaccggccgagatcattgtggtgccagcggacaagaccct |
| | | cgcacgggtcggaaatccgacagacgaaaacgcccccgcggtgctcccaggg |
| | | ccaccagccggccccaggtatcgcgtcttcgtcctgggggccccgacgccag |
| | | ccgacaatggcagcgcgctggacgcactacggcgggtggccggctaccccga |
| | | ggagagcacgaactacgcacagtatatgagccgggcctatgcggagtttcta |
| | | ggggaggacccgggaagcggcacggacgcgaggccgagcctgttctggcgcc |
| | | tcgcagggctgctcgccagcagcgggtttgcgttcgtcaacgcggcacacgc |
| | | ccacgacgcgattcgcctcagcgacctgctgggctttctagcccacagccgc |
| | | gtgctggccggcctggccgcccggggagcagcgggctgtgcggccgacagcg |
| | | tgttcctgaacgtgagcgtgttggacccggcggccaggctgcggcttgaggc |
| | | gcgcctcggacatctggtggcagcgatcctcgagcgagagcagagcctagcg |
| | | gcgcacgcgctgggctatcagctggcgttcgtgttggacagccccgcggcct |
| | | atggcgcggtggccccgagcgcggcccgcctgatcgacgcactgtacgccga |
| | | gtttctcggcggccgcgcgctaaccgccccgatggtccgccgagcgctgttt |
| | | tacgcaacggccgtcctccgggcaccgttcctggcaggcgcgcccagcgccg |
| | | agcagcgggaacgcgcccgccggggactcctcataaccacggcactgtgtac |
| | | gagcgacgtagcagcggcgacccacgccgatctccgggccgcgctcgccagg |
| | | accgaccaccagaaaaacctcttctggctcccggaccacttttccccatgcg |
| | | cagcatccctgcgcttcgatctcgccgaaggagggttcatcctggacgcact |
| | | ggccatggccacccgatccgacatcccggcggacgtcatggcacaacagacc |
| | | cgcggcgtggcctccgcacttacgcgctgggcgcactacaacgccctgatcc |
| | | gcgccttcgtcccggaggccacccatcagtgtagcggcccgagccacaacgc |
| | | ggagccccggatcctcgtacccatcacccacaacgccagctatgtcgtcaca |
| | | cacacccccttgccacgcgggatcggatacaagctcacgggcgttgacgtcc |
| | | gccgcccactgtttatcacctatctcaccgccacctgcgaagggcacgcgcg |
| | | ggagattgagccgaaacggctggtgcgcaccgaaaaccggcgcgaccttggc |
| | | ctcgtgggggccgtgtttctgcgctacaccccggccggggaggtcatgagcg |
| | | tgctgctagtggacacggatgccacccaacagcagctggcccaggggccggt |
| | | ggcgggcaccccgaacgtgttttccagcgatgtaccaagcgtggccctgtta |
| | | ttgttccccaatggaacagtgattcatctgctggcctttgacacgctgccca |
| | | tcgccaccatcgcccccgggttcctggccgcgtccgcgcttggagtcgttat |
| | | gattaccgcggcactggcaggcatcctcagggtggtccgaacgtgcgtccca |
| | | tttttgtggagacgcgaaGCCACGAACTTCTCACTATTAAAGCAAGCAGGAG |
| | | ACGTGGAAGAAAACCCCGGTCCAatggggttcgtctgtctgtttgggcttgt |
| | | cgtaatgggagcctggggggcgtggggaggatcacaggcaaccgaatatgtt |
| | | cttaggagtgttattgccaaagaggtgggggacatactaagagtaccatgca |
| | | tgcggacccccgcggatgatgtttcatggcgctacgaggccccgagcgttat |
| | | tgactatgccaggatagacggaatatttcttcgctatcactgcccggggctt |
| | | gacacgttcttgtgggataggcacgcccagagggcatatctggttaatccct |
| | | ttctctttgcggcgggatttttggaggacttgagtcactcagtgtttccggc |
| | | cgacacacaggaaacaacaacgcgcagggccctttataaagagatacgcgat |
| | | gcgttgggcagtcgaaaacaggccgtcagccacgcacccgtcagggccgggt |
| | | gtgtaaacttcgactactcaaggacaaggcgctgcgtcgggcgacgcgattt |
| | | acggccagccaacaccacgtcaacgtgggaaccaccagtgagcagcgacgat |
| | | gaagcaagctcgcagagcaagcccctcgccacccagccgcccgtcctcgccc |
| | | tttcgaacgcacccccacgggggtctccccgacgcgaggacggcgccggca |
| | | tacacgcctccgacgcaat |
| ARV-HSV-mRNA-2 | 341 | MGRLTSGVGTAALLVVAVGLRVVCAKYALADPSLKMADPNRFRGKNLPVLDQ |
| (HSV-2 glycoprotein | | LTDPPGVKRVYHIQPSLEDPFQPPSIPITVYYAVLERACRSVLLHAPSEAPQ |
| D and glycoprotein | | IVRGASDEARKHTYNLTIAWYRMGDNCAIPITVMEYTECPYNKSLGVCPIRT |
| B); Protein sequence | | QPRWSYYDSFSAVSEDNLGFLMHAPAFETAGTYLRLVKINDWTEITQFILEH |
| | | RARASCCYALPLRIPPAACLISKAYQQGVTVDSIGMLPRFIPENQRIVALYS |
| | | LKIAGWHGPKPPYTSILLPPELSDITNATQPELVPEDPEDSCLLEDPAGTVS |
| | | SQIPPNWHIPSIQDVAPHHAPAAPSNPGLIIGALAGSTLAVLVIGGIAFWVR |
| | | RRAQMAPKRLRLPHIRDDDAPPSHQPLFYATNFSLLKQAGDVEENPGPMRGG |
| | | GLICALVVGALVAAVASAAPAAPRASGGVAATVAANGGPASRPPPVPSPATT |
| | | RARKRKTKKPPERPEATPPPDANATVAAGHATLRAHLREIKVENADAQFYVC |
| | | PPPTGATVVQFEQPRRCPTRPEGQNYTEGIAVVFKENIAPYKFKATMYYKDV |
| | | TVSQVWFGHRYSQFMGTFEDRAPVPFFEVTDKTNAKGVCRSTAKYVRNNMFT |
| | | TAFHRDDHETDMELKPAKVATRTSRGWHTTDLKYNPSRVEAFHRYGTTVNCI |
| | | VEEVDARSVYPYDEFVLATGDFVYMSPFYGYREGSHTEHTSYAADRFKQVDG |
| | | FYARDLTTKARATSPTTRNLLTTPKFTVAWDWVPKRPAVCTMTKWQEVDEML |
| | | RAEYGGSFRFSSDAISTTFTTNLTQYSLSRVDLGDCIGRDAREAIDRMFARK |
| | | YNATHIKVGQPQYYLATGGFLIAYQPLLSNTLAELYVREYMREQDRKPRNAT |
| | | PAPLREAPSANASVERIKTTSSIEFARLQFTYNHIQRPVNDMLGRIAVAWCE |
| | | LQNHELTLWNEARKLNPNAIASATVGRRVSARMLGDVMAVSTCVPVAPDNVI |
| | | VQNSMRVSSRPGTCYSRPLVSFRYEDQGPLIEGQLGENNELRLTRDALEPCT |
| | | VGHRRYFIFGGGYVYFEEYAYSHQLSRADVITVSTFIDLNITMLEDHEFVPL |
| | | EVYTRHEIKDSGLLDYTEVQRRNQLHDLRFAAIDTVIRADANAAMFAGLCAF |
| | | FEGMGDLGRAVGKVVMGVVGGVVSAVSGVSSFMSNPFGALAVGLLVLAGLVA |
| | | AFFAFRYVLQLQRNPMKALYPLTTKELKTSDPGGVGGEGEEGAEGGGFDEAK |
| | | LAEAREMIRYMALVSAMERTEHKARKKGTSALLSSKVTNMVLRKRNKARYSP |
| | | LHNEDEAGDEDEL |
| ARV-HSV-mRNA-2 | 342 | atggggcgattgacctccggcgtcgggacggcggccctgctagtagtcgcgg |
| (HSV-2 glycoprotein | | tgggactccgcgtcgtctgcgccaaatacgccttagcagaccccagccttaa |
| D and glycoprotein | | gatggccgatcccaatcgatttcgcgggaagaaccttccggtattggaccag |
| B); DNA sequence | | ctgaccgacccccccggggtgaagcgagtataccacatacagccgagcctgg |
| | | aggacccgttccagccccccagcatcccgatcacagtgtactacgcagtgct |
| | | ggaacgagcctgccgcagcgtgctcctacatgccccaagcgaggccccccag |
| | | atcgtgcgcggggcatccgacgaggcccgaaagcacacgtacaacctgacca |
| | | tcgcctggtatcgcatgggagacaattgcgcaatccccatcacggtaatgga |
| | | atacaccgagtgcccctacaacaagagcttgggggtctgccccatccgaacg |
| | | cagccccgctggagctactatgacagctttagcgccgtcagcgaggataacc |
| | | tgggattcctgatgcacgcccccgccttcgagaccgcgggaacgtacctgcg |
| | | gctagtgaagataaacgactggacggagatcacacaatttatcctggagcac |
| | | cgggcccgcgcctcctgctgctacgcactccccctgcgcatccccccggcag |
| | | cgtgcctcaccagcaaggcctaccaacagggcgtgacggtcgacagcatcgg |
| | | gatgctaccccgctttatccccgaaaaccagcgcaccgtcgccctatacagc |
| | | ttaaaaatcgccggctggcacggccccaagcccccgtacaccagcaccctgc |
| | | tgccgccggagctttccgacaccaccaacgccacgcaacccgaactcgtacc |
| | | ggaagaccccgaggacagctgcctcttagaggatcccgccgggacggtgtca |
| | | tcacagatccccccaaactggcacatcccgtcgatccaggacgtcgcgccgc |
| | | accacgcccccgccgcccccagcaacccgggcctgatcatcggcgcgctggc |
| | | cggcagtaccctggcggtgctggtcatcggcggaatagcgttttgggtacgc |
| | | cgccgcgcacagatggcccccaagcgcctacgactcccccacatccgggatg |
| | | acgacgcgccccccagccaccagccattgttttacGCCACGAACTTCTCACT |
| | | GTTAAAGCAAGCAGGAGACGTGGAAGAAAACCCCGGACCAatgcgcgggggg |
| | | ggcttgatatgcgcgctggtcgtgggggcgctggtggccgcggtggcgtcgg |
| | | cggccccggcggccccccgcgccagcggcggcgtggccgcgaccgtcgcggc |
| | | gaacgggggacccgcctcccggccgccccccgtcccgagccccgcgaccacc |
| | | agggcccggaagcggaaaaccaaaaagccgcccgagcggcccgaggcgaccc |
| | | cgccccccgacgccaacgcgaccgtcgccgccggccacgccacgctgcgcgc |
| | | gcacctgcgggaaatcaaggtcgagaacgccgatgcccagttttacgtgtgc |
| | | ccacccccgacaggcgccacggtggtgcagtttgagcagccgcgccgctgcc |
| | | cgacgcgcccggaggggcagaactacacggagggcatcgcggtggtcttcaa |
| | | ggagaacatcgccccgtacaaattcaaggccaccatgtactacaaagacgtg |
| | | accgtgtcgcaggtgtggttcggccaccgctactcccagtttatggggatat |
| | | tcgaggaccgcgcccccgtacccttcgaggaggtgatcgacaagataaacgc |
| | | caagggggtctgccgctccacggccaagtacgtgcggaacaacatggagacc |
| | | accgcgtttcaccgggacgaccacgagaccgacatggagctcaagccggcga |
| | | aggtcgccacgcgcacgagccgggggtggcacaccaccgacctcaagtacaa |
| | | ccccagccgggtggaggcgttccatcggtacggcacgacggtcaactgcatc |
| | | gtcgaggaggtggacgcgcggtcggtgtacccgtacgatgagtttgtgctgg |
| | | cgacgggcgactttgtgtacatgtccccgttttacggctaccgggaggggag |
| | | ccacaccgagcacaccagctacgccgccgaccgcttcaagcaggtcgacggc |
| | | ttctacgcgcgcgacctcaccacgaaggcccgggccacgagcccgacgaccc |
| | | gcaacttgctgacgacccccaagtttaccgtggcctgggactgggtgccgaa |
| | | gcgaccggcggtctgcaccatgaccaagtggcaggaggtggacgagatgctc |
| | | cgcgccgagtacggcggctccttccgcttctcctccgacgccatcagcacca |
| | | ccttcaccaccaacctgacccagtacagcctcagccgcgtcgacctgggcga |
| | | ctgcatcggccgggatgcccgcgaggccatcgaccgcatgtttgcgcgcaag |
| | | tacaacgccacgcacatcaaggtgggccagccgcagtactacctggccacgg |
| | | ggggcttcctcatcgcgtaccagcccctcctcagcaacacgctcgccgagct |
| | | gtacgtgcgggagtacatgcgggagcaggaccgcaagccccggaatgccacg |
| | | cccgcgccactgcgggaggcgcccagcgccaacgcgagcgtggagcgcatca |
| | | agaccaccagcagcatcgagttcgcccggctgcagtttacgtataaccatat |
| | | acagcgccccgtgaacgacatgctggggcgcatcgccgtcgcgtggtgcgag |
| | | ctgcagaaccacgagctgacactctggaacgaggcccgcaagctcaacccca |
| | | acgccatcgccagcgccaccgtcggccggcgggtgagcgcgcgcatgctcgg |
| | | agacgtcatggccgtctccacgtgcgtgcccgtcgccccggacaacgtgatc |
| | | gtgcagaacagcatgcgcgtcagcagccggccggggacgtgctacagccgcc |
| | | ccctggtcagctttcggtacgaagaccagggcccgctgatcgaggggcagct |
| | | gggcgagaacaacgagctgcgcctcacccgcgacgcgctcgagccgtgcacc |
| | | gtgggccaccggcgctacttcatcttcggcgggggctacgtatacttcgagg |
| | | agtacgcgtactcacaccagctgagtcgcgccgacgtcaccaccgtcagcac |
| | | cttcatcgacctgaacatcaccatgctggaggaccacgagtttgtgcccctg |
| | | gaggtctacacgcgccacgagatcaaggacagcggcctgctggactacacgg |
| | | aggtccagcgccgcaaccagctgcacgacctgcgctttgccgccatcgacac |
| | | ggtcatccgcgccgacgccaacgccgccatgttcgcggggctgtgcgcgttc |
| | | ttcgaggggatgggggacttggggcgcgcggtcggcaaggtcgtcatgggag |
| | | tagtggggggcgtggtgagcgccgtcagcggcgtgagctcctttatgtccaa |
| | | ccccttcggggcgcttgccgtggggctactggtcctggccggcctggtcgcg |
| | | gccttcttcgccttccgctacgtcctgcaactgcaacgcaatcccatgaagg |
| | | ccctgtatccgctcaccaccaaggaactcaagacatccgaccccgggggcgt |
| | | gggcggggagggggaggaaggcgcggaggggggcgggtttgacgaggccaag |
| | | ttggccgaggcccgagaaatgatccgatatatggcattggtgagcgccatgg |
| | | agcgcacggaacacaaggccagaaagaagggcacgagcgccctgctcagctc |
| | | caaggtcaccaacatggtactgcgcaagcgcaacaaagccaggtactcaccg |
| | | ctccacaacgaggacgaggccggagacgaagacgagctc |
| ARV-HSV-gL (HSV- | 603 | MGFVCLFGLVVMGAWGAWGGSQATEYVLRSVIAKEVGDILRVPCMRTPADDV |
| 2 glycoprotcin L), | | SWRYEAPSVIDYARIDGIFLRYHCPGLDTELWDRHAQRAYLVNPFLFAAGFL |
| Protein sequence. | | EDLSHSVFPADTQETTTRRALYKEIRDALGSRKQAVSHAPVRAGCVNFDYSR |
| | | TRRCVGRRDLRPANTTSTWEPPVSSDDEASSQSKPLATQPPVLALSNAPPRR |
| | | VSPTRGRRRIITRLRRN* |
| ARV-HSV-gL (HSV- | 604 | GAATTCGGCTTTAATACGACTCACTATAAGGACATTAGCTTCTGACACAACT |
| 2 glycoprotein L), | | GTGTTCACTAGCAACCTCAAACAGCCACCatggggttcgtctgtctgtttgg |
| DNA sequence. | | gcttgtcgtaatgggagcctggggggcgtggggaggatcacaggcaaccgaa |
| | | tatgttcttaggagtgttattgccaaagaggtgggggacatactaagagtac |
| | | catgcatgcggacccccgcggatgatgtttcatggcgctacgaggccccgag |
| | | cgttattgactatgccaggatagacggaatatttcttcgctatcactgcccg |
| | | gggcttgacacgttcttgtgggataggcacgcccagagggcatatctggtta |
| | | atccctttctctttgcggcgggatttttggaggacttgagtcactcagtgtt |
| | | tccggccgacacacaggaaacaacaacgcgcagggccctttataaagagata |
| | | cgcgatgcgttgggcagtcgaaaacaggccgtcagccacgcacccgtcaggg |
| | | ccgggtgtgtaaacttcgactactcaaggacaaggcgctgcgtcgggcgacg |
| | | cgatttacggccagccaacaccacgtcaacgtgggaaccaccagtgagcagc |
| | | gacgatgaagcaagctcgcagagcaagcccctcgccacccagccgcccgtcc |
| | | tcgccctttcgaacgcacccccacggcgggtctccccgacgcgaggacggcg |
| | | ccggcatacacgcctccgacgcaattgataaCGTACGGCTGGAGCCTCGGTG |
| | | GCCTAGCTTCTTGCCCCTTGGGCCTCCCCCCAGCCCCTCCTCCCCTTCCTGC |
| | | ACCCGTACCCCCGTGGTCTTTGAATAAAGTCTGAGTGGGCGGCAaaaaaaaa |
| | | aaaaaaaaaaaaaaaaaaaaagcatatgactaaaaaaaaaaaaaaaaaaaaa |
| | | aaaaaaaaaaaaaaaaaaaaaaaaaaaaaaaaaaaaaaaaaaaaaaaaaAAA |
| | | AGAAGAGCAAGCTT |
| ARV-HSV-gB-WT | 605 | MRGGGLICALVVGALVAAVASAAPAAPRASGGVAATVAANGGPASRPPPVPS |
| (HSV-2 glycoprotein | | PATTRARKRKTKKPPERPEATPPPDANATVAAGHATLRAHLREIKVENADAQ |
| B wildtype), Protein | | FYVCPPPTGATVVQFEQPRRCPTRPEGQNYTEGIAVVFKENIAPYKFKATMY |
| sequence | | YKDVTVSQVWFGHRYSQFMGIFEDRAPVPFEEVIDKINAKGVCRSTAKYVRN |
| | | NMETTAFHRDDHETDMELKPAKVATRTSRGWHTTDLKYNPSRVEAFHRYGTT |
| | | VNCIVEEVDARSVYPYDEFVLATGDFVYMSPFYGYREGSHTEHTSYAADRFK |
| | | QVDGFYARDLTTKARATSPTTRNLLTTPKFTVAWDWVPKRPAVCTMTKWQEV |
| | | DEMLRAEYGGSFRFSSDAISTTFTTNLTQYSLSRVDLGDCIGRDAREAIDRM |
| | | FARKYNATHIKVGQPQYYLATGGFLIAYQPLLSNTLAELYVREYMREQDRKP |
| | | RNATPAPLREAPSANASVERIKTTSSIEFARLQFTYNHIQRHVNDMLGRIAV |
| | | AWCELQNHELTLWNEARKLNPNAIASATVGRRVSARMLGDVMAVSTCVPVAP |
| | | DNVIVQNSMRVSSRPGTCYSRPLVSFRYEDQGPLIEGQLGENNELRLTRDAL |
| | | EPCTVGHRRYFIFGGGYVYFEEYAYSHQLSRADVTTVSTFIDLNITMLEDHE |
| | | FVPLEVYTRHEIKDSGLLDYTEVQRRNQLHDLRFADIDTVIRADANAAMFAG |
| | | LCAFFEGMGDLGRAVGKVVMGVVGGVVSAVSGVSSFMSNPFGALAVGLLVLA |
| | | GLVAAFFAFRYVLQLQRNPMKALYPLTTKELKTSDPGGVGGEGEEGAEGGGF |
| | | DEAKLAEAREMIRYMALVSAMERTEHKARKKGTSALLSSKVTNMVLRKRNKA |
| | | RYSPLHNEDEAGDEDE* |
| ARV-HSV-gB-WT | 606 | GAATTCGGCTTTAATACGACTCACTATAAGGACATTAGCTTCTGACACAACT |
| (HSV-2 glycoprotein | | GTGTTCACTAGCAACCTCAAACAGCCACCatgcgcggggggggcttgatatg |
| B wildtype), DNA | | cgcgctggtcgtgggggcgctggtggccgcggtggcgtcggcggccccggcg |
| sequence | | gccccccgcgccagcggcggcgtggccgcgaccgtcgcggcgaacgggggac |
| | | ccgcctcccggccgccccccgtcccgagccccgcgaccaccagggcccggaa |
| | | gcggaaaaccaaaaagccgcccgagcggcccgaggcgaccccgccccccgac |
| | | gccaacgcgaccgtcgccgccggccacgccacgctgcgcgcgcacctgcggg |
| | | aaatcaaggtcgagaacgccgatgcccagttttacgtgtgcccacccccgac |
| | | aggcgccacggtggtgcagtttgagcagccgcgccgctgcccgacgcgcccg |
| | | gaggggcagaactacacggagggcatcgcggtggtcttcaaggagaacatcg |
| | | ccccgtacaaattcaaggccaccatgtactacaaagacgtgaccgtgtcgca |
| | | ggtgtggttcggccaccgctactcccagtttatggggatattcgaggaccgc |
| | | gcccccgtacccttcgaggaggtgatcgacaagataaacgccaagggggtct |
| | | gccgctccacggccaagtacgtgcggaacaacatggagaccaccgcgtttca |
| | | ccgggacgaccacgagaccgacatggagctcaagccggcgaaggtcgccacg |
| | | cgcacgagccgggggtggcacaccaccgacctcaagtacaaccccagccggg |
| | | tggaggcgttccatcggtacggcacgacggtcaactgcatcgtcgaggaggt |
| | | ggacgcgcggtcggtgtacccgTATgatgagtttgtgctggcgacgggcgac |
| | | tttgtgtacatgtccccgttttacggctaccgggaggggagccacaccgagc |
| | | acaccagctacgccgccgaccgcttcaagcaggtcgacggcttctacgcgcg |
| | | cgacctcaccacgaaggcccgggccacgagcccgacgacccgcaacttgctg |
| | | acgacccccaagtttaccgtggcctgggactgggtgccgaagcgaccggcgg |
| | | tctgcaccatgaccaagtggcaggaggtggacgagatgctccgcgccgagta |
| | | cggcggctccttccgcttctcctccgacgccatcagcaccaccttcaccacc |
| | | aacctgacccagtacagcctcagccgcgtcgacctgggcgactgcatcggcc |
| | | gggatgcccgcgaggccatcgaccgcatgtttgcgcgcaagtacaacgccac |
| | | gcacatcaaggtgggccagccgcagtactacctggccacggggggcttcctc |
| | | atcgcgtaccagcccctcctcagcaacacgctcgccgagctgtacgtgcggg |
| | | agtacatgcgggagcaggaccgcaagccccggaatgccacgcccgcgccact |
| | | gcgggaggcgcccagcgccaacgcgagcgtggagcgcatcaagaccaccagc |
| | | agcatcgagttcgcccggctgcagtttacgtataaccatatacagcgcCACg |
| | | tgaacgacatgctggggcgcatcgccgtcgcgtggtgcgagctgcagaacca |
| | | cgagctgacactctggaacgaggcccgcaagctcaaccccaacgccatcgcc |
| | | agcgccaccgtcggccggcgggtgagcgcgcgcatgctcggagacgtcatgg |
| | | ccgtctccacgtgcgtgcccgtcgccccggacaacgtgatcgtgcagaacag |
| | | catgcgcgtcagcagccggccggggacgtgctacagccgccccctggtcagc |
| | | tttcggtacgaagaccagggcccgctgatcgaggggcagctgggcgagaaca |
| | | acgagctgcgcctcacccgcgacgcgctcgagccgtgcaccgtgggccaccg |
| | | gcgctacttcatcttcggcgggggctacgtatacttcgaggagtacgcgtac |
| | | tcacaccagctgagtcgcgccgacgtcaccaccgtcagcaccttcatcgacc |
| | | tgaacatcaccatgctggaggaccacgagtttgtgcccctggaggtctacac |
| | | gcgccacgagatcaaggacagcggcctgctggactacacggaggtccagcgc |
| | | cgcaaccagctgcacgacctgcgctttgccgacatcgacacggtcatccgcg |
| | | ccgacgccaacgccgccatgttcgcggggctgtgcgcgttcttcgaggggat |
| | | gggggacttggggcgcgcggtcggcaaggtcgtcatgggagtagtggggggc |
| | | gtggtgagcgccgtcagcggcgtgagctcctttatgtccaaccccttcgggg |
| | | cgcttgccgtggggctactggtcctggccggcctggtcgcggccttcttcgc |
| | | cttccgctacgtcctgcaactgcaacgcaatcccatgaaggccctgtatccg |
| | | ctcaccaccaaggaactcaagacatccgaccccgggggcgtgggcggggagg |
| | | gggaggaaggcgcggaggggggcgggtttgacgaggccaagttggccgaggc |
| | | ccgagaaatgatccgatatatggcattggtgagcGCGatggagcgcacggaa |
| | | cacaaggccagaaagaagggcacgagcgccctgctcagctccaaggtcacca |
| | | acatggtactgcgcaagcgcaacaaagccaggtactcaccgctccacaacga |
| | | ggacgaggccggagacgaagacgagctctgaCGTACGGCTGGAGCCTCGGTG |
| | | GCCTAGCTTCTTGCCCCTTGGGCCTCCCCCCAGCCCCTCCTCCCCTTCCTGC |
| | | ACCCGTACCCCCGTGGTCTTTGAATAAAGTCTGAGTGGGCGGCAaaaaaaaa |
| | | aaaaaaaaaaaaaaaaaaaaagcatatgactaaaaaaaaaaaaaaaaaaaaa |
| | | aaaaaaaaaaaaaaaaaaaaaaaaaaaaaaaaaaaaaaaaaaaaaaaaaAAA |
| | | AGAAGAGCAAGCTT |
| ARV-HSV-gB (HSV- | 607 | MRGGGLICALVVGALVAAVASAAPAAPRASGGVAATVAANGGPASRPPPVPS |
| 2 glycoprotein B), | | PATTRARKRKTKKPPERPEATPPPDANATVAAGHATLRAHLREIKVENADAQ |
| Protein sequence | | FYVCPPPTGATVVQFEQPRRCPTRPEGQNYTEGIAVVFKENIAPYKFKATMY |
| | | YKDVTVSQVWFGHRYSQFMGIFEDRAPVPFEEVIDKINAKGVCRSTAKYVRN |
| | | NMETTAFHRDDHETDMELKPAKVATRTSRGWHTTDLKYNPSRVEAFHRYGTT |
| | | VNCIVEEVDARSVYPYDEFVLATGDFVYMSPFYGYREGSHTEHTSYAADRFK |
| | | QVDGFYARDLITKARATSPTTRNLLTTPKFTVAWDWVPKRPAVCTMTKWQEV |
| | | DEMLRAEYGGSFRFSSDAISTTFTTNLTQYSLSRVDLGDCIGRDAREAIDRM |
| | | FARKYNATHTKVGQPQYYLATGGFTTAYQPTTSNTLAFTYVREYMREQDRKP |
| | | RNATPAPLREAPSANASVERIKTTSSIEFARLQFTYNHIQRPVNDMLGRIAV |
| | | AWCELQNHELTLWNEARKLNPNAIASATVGRRVSARMLGDVMAVSTCVPVAP |
| | | DNVIVQNSMRVSSRPGTCYSRPLVSFRYEDQGPLIEGQLGENNELRLTRDAL |
| | | EPCTVGHRRYFIFGGGYVYFEEYAYSHQLSRADVTTVSTFIDLNITMLEDHE |
| | | FVPLEVYTRHEIKDSGLLDYTEVQRRNQLHDIRFAAIDTVIRADANAAMFAG |
| | | LCAFFEGMGDLGRAVGKVVMGVVGGVVSAVSGVSSFMSNPFGALAVGLLVLA |
| | | GLVAAFFAFRYVLQLQRNPMKALYPLTTKELKTSDPGGVGGEGEEGAEGGGF |
| | | DEAKLAEAREMIRYMAVSAMERTEHIKARKKGTSALLSSKVTNMVLRKRNKA |
| | | RYSPLHNEDEAGDEDEL* |
| ARV-HSV-gB (HSV- | 608 | GAATTCGGCTTTAATACGACTCACTATAAGGACATTAGCTECTGACACAACT |
| 2 glycoprotein B), | | GTGTTCACTAGCAACCTCAAACAGCCACCatgcgcggggggggcttgatatg |
| DNA sequence | | cgcgctggtcgtgggggcgctggtggccgcggtggcgtcggcggccccggcg |
| | | gccccccgcgccagcggcggcgtggccgcgaccgtcgcggcgaacgggggac |
| | | ccgcctcccggccgccccccgtcccgagccccgcgaccaccagggcccggaa |
| | | gcggaaaaccaaaaagccgcccgagcggcccgaggcgaccccgccccccgac |
| | | gccaacgcgaccgtcgccgccggccacgccacgctgcgcgcgcacctgcggg |
| | | aaatcaaggtcgagaacgccgatgcccagttttacgtgtgcccacccccgac |
| | | aggcgccacggtggtgcagtttgagcagccgcgccgctgcccgacgcgcccg |
| | | gaggggcagaactacacggagggcatcgcggtggtcttcaaggagaacatcg |
| | | ccccgtacaaattcaaggccaccatgtactacaaagacgtgaccgtgtcgca |
| | | ggtgtggttcggccaccgctactcccagtttatggggatattcgaggaccgc |
| | | gcccccgtacccttcgaggaggtgatcgacaagataaacgccaagggggtct |
| | | gccgctccacggccaagtacgtgcggaacaacatggagaccaccgcgtttca |
| | | ccgggacgaccacgagaccgacatggagctcaagccggcgaaggtcgccacg |
| | | cgcacgagccgggggtggcacaccaccgacctcaagtacaaccccagccggg |
| | | tggaggcgttccatcggtacggcacgacggtcaactgcatcgtcgaggaggt |
| | | ggacgcgcggtcggtgtacccgTATgatgagtttgtgctggcgacgggcgac |
| | | tttgtgtacatgtccccgttttacggctaccgggaggggagccacaccgagc |
| | | acaccagctacgccgccgaccgcttcaagcaggtcgacggcttctacgcgcg |
| | | cgacctcaccacgaaggcccgggccacgagcccgacgacccgcaacttgctg |
| | | acgacccccaagtttaccgtggcctgggactgggtgccgaagcgaccggcgg |
| | | tctgcaccatgaccaagtggcaggaggtggacgagatgctccgcgccgagta |
| | | cggcggctccttccgcttctcctccgacgccatcagcaccaccttcaccacc |
| | | aacctgacccagtacagcctcagccgcgtcgacctgggcgactgcatcggcc |
| | | gggatgcccgcgaggccatcgaccgcatgtttgcgcgcaagtacaacgccac |
| | | gcacatcaaggtgggccagccgcagtactacctggccacggggggcttcctc |
| | | atcgcgtaccagcccctcctcagcaacacgctcgccgagctgtacgtgcggg |
| | | agtacatgcgggagcaggaccgcaagccccggaatgccacgcccgcgccact |
| | | gcgggaggcgcccagcgccaacgcgagcgtggagcgcatcaagaccaccagc |
| | | agcatcgagttcgcccggctgcagtttacgtataaccatatacagcgccccg |
| | | tgaacgacatgctggggcgcatcgccgtcgcgtggtgcgagctgcagaacca |
| | | cgagctgacactctggaacgaggcccgcaagctcaaccccaacgccatcgcc |
| | | agcgccaccgtcggccggcgggtgagcgcgcgcatgctcggagacgtcatgg |
| | | ccgtctccacgtgcgtgcccgtcgccccggacaacgtgatcgtgcagaacag |
| | | catgcgcgtcagcagccggccggggacgtgctacagccgccccctggtcagc |
| | | tttcggtacgaagaccagggcccgctgatcgaggggcagctgggcgagaaca |
| | | acgagctgcgcctcacccgcgacgcgctcgagccgtgcaccgtgggccaccg |
| | | gcgctacttcatcttcggcgggggctacgtatacttcgaggagtacgcgtac |
| | | tcacaccagctgagtcgcgccgacgtcaccaccgtcagcaccttcatcgacc |
| | | tgaacatcaccatgctggaggaccacgagtttgtgcccctggaggtctacac |
| | | gcgccacgagatcaaggacagcggcctgctggactacacggaggtccagcgc |
| | | cgcaaccagctgcacgacctgcgctttgccgccatcgacacggtcatccgcg |
| | | ccgacgccaacgccgccatgttcgcggggctgtgcgcgttcttcgaggggat |
| | | gggggacttggggcgcgcggtcggcaaggtcgtcatgggagtagtggggggc |
| | | gtggtgagcgccgtcagcggcgtgagctcctttatgtccaaccccttcgggg |
| | | cgcttgccgtggggctactggtcctggccggcctggtcgcggccttcttcgc |
| | | cttccgctacgtcctgcaactgcaacgcaatcccatgaaggccctgtatccg |
| | | ctcaccaccaaggaactcaagacatccgaccccgggggcgtgggcggggagg |
| | | gggaggaaggcgcggaggggggcgggtttgacgaggccaagttggccgaggc |
| | | ccgagaaatgatccgatatatggcattggtgagcGCGatggagcgcacggaa |
| | | cacaaggccagaaagaagggcacgagcgccctgctcagctccaaggtcacca |
| | | acatggtactgcgcaagcgcaacaaagccaggtactcaccgctccacaacga |
| | | ggacgaggccggagacgaagacgagctctgaCGTACGGCTGGAGCCTCGGTG |
| | | GCCTAGCTTCTTGCCCCTTGGGCCTCCCCCCAGCCCCTCCTCCCCTTCCTGC |
| | | ACCCGTACCCCCGTGGTCTTTGAATAAAGTCTGAGTGGGCGGCAaaaaaaaa |
| | | aaaaaaaaaaaaaaaaaaaaagcatatgactaaaaaaaaaaaaaaaaaaaaa |
| | | aaaaaaaaaaaaaaaaaaaaaaaaaaaaaaaaaaaaaaaaaaaaaaaaaAAA |
| | | AGAAGAGCAAGCTT |
| ARV-HSV-gB-RS | 609 | MRGGGLICALVVGALVAAVASAAPAAPAAPRASGGVAATVAANGGPASRPPP |
| (HSV-2 glycoprotein | | VPSPATTKARKRKTKKPPKRPEATPPPDANATVAAGHATLRAHLREIKVENA |
| B), Protein sequence | | DAQFYVCPPPTGATVVQFEQPRRCPIRPEGQNYTEGIAVVFKENIAPYKFKA |
| | | TMYYKDVTVSQVWFGHRYSQFMGIFEDRAPVPFEEIIDKINAKGVCRSTAKY |
| | | VRNNMETTAFHRDDHETDMELKPAKFATRTSRGWHTTDLKYNPSRVEAFHRY |
| | | GTTVNCIVEEVDARSVYPYDEFVLATGDFVYMSPFYGYREGSHTEHTSYAAD |
| | | RFKQVDGFYPRQLTTKARATSPTTRNLLTTPKFTVAWDWVPKRPAVCTMTKW |
| | | QEVDEMLRAEYGGSFRFSSDAISTTFTTNLTEYSLSRVDLGDCIGRDAREAI |
| | | DRIFARKYNATHIKVGQPQYYLATGGFLIAYQPLLSNTLAELYVREYMREQD |
| | | RKPRNATPAPLREAPSANASVERIKTTSSIEFARLQFTYNHIQRHVNDMLGR |
| | | IAVAWCELQNHELTLWNEARKLNPNAIASATVGRRVSARMLGDVMAVSTCVP |
| | | VAPDNVIIQNSMRVSSRPGTCYSRPLVSFRYEDQGPLIEGQLGENNEMRLTR |
| | | DALEPCTVGHRRYFIFGGGYVYFEEYAYSHQLSRADVTTVSTFIDLNITMLH |
| | | DHEFVPLEVYTRHEIKDSGLLPYTEVQRRLQLLDLRFADIDTVINYDPNAAM |
| | | FAGLYAFFEGMGDVGRAVGKVVMGVVGGVVSAVSGVSSFMSNPFGALAVGLL |
| | | VLAGLVAAFFAFRYVLRLQRNPMKALYPLTLKELKTSDPGGVGGEGEEGAEG |
| | | GGFDEAKLAEAREMIRYMALVSAMERTEHKARKKGTSALLSSKVINMVLRKR |
| | | NKARYSPLHNEDEAGDEDEL* |
| ARV-HSV-gB-RS | 610 | GAATTCTAATACGACTCACTATAAGGACATTAGCTTCTGACACAACTGTGTT |
| (HSV-2 glycoprotein | | CACTAGCAACCTCAAACAGCCACCatgcgcggggggggcttgatatgcgcgc |
| B), DNA sequence | | tggtcgtgggggcgctggtggccgcggtggcgtcggcggccccggcggcccc |
| | | cgcggccccccgcgccagcggcggcgtggccgcgaccgtcgcggcgaacggg |
| | | ggacccgcctcccggccgccccccgtcccgagccccgcgaccaccaaggccc |
| | | ggaagcggaaaaccaaaaagccgcccaagcggcccgaggcgaccccgccccc |
| | | cgacgccaacgcgaccgtcgccgccggccacgccacgctgcgcgcgcacctg |
| | | cgggaaatcaaggtcgagaacgccgatgcccagttttacgtgtgcccacccc |
| | | cgacaggcgccacggtggtgcagtttgagcagccgcgccgctgcccgacgcg |
| | | cccggaggggcagaactacacggagggcatcgcggtggtcttcaaggagaac |
| | | atcgccccgtacaaattcaaggccaccatgtactacaaagacgtgaccgtgt |
| | | cgcaggtgtggttcggccaccgctactcccagtttatggggatattcgagga |
| | | ccgcgcccccgtacccttcgaggagatcatcgacaagataaacgccaagggg |
| | | gtctgccgctccacggccaagtacgtgcggaacaacatggagaccaccgcgt |
| | | ttcaccgggacgaccacgagaccgacatggagctcaagccggcgaagttcgc |
| | | cacgcgcacgagccgggggtggcacaccaccgacctcaagtacaaccccagc |
| | | cgggtggaggcgttccatcggtacggcacgacggtcaactgcatcgtcgagg |
| | | aggtggacgcgcggtcggtgtacccgTATgatgagtttgtgctggcgacggg |
| | | cgactttgtgtacatgtccccgttttacggctaccgggaggggagccacacc |
| | | gagcacaccagctacgccgccgaccgcttcaagcaggtcgacggcttctacc |
| | | cgcgcgacctcaccacgaaggcccgggccacgagcccgacgacccgcaactt |
| | | gctgacgacccccaagtttaccgtggcctgggactgggtgccgaagcgaccg |
| | | gcggtctgcaccatgaccaagtggcaggaggtggacgagatgctccgcgccg |
| | | agtacggcggctccttccgcttctcctccgacgccatcagcaccaccttcac |
| | | caccaacctgaccgagtacagcctcagccgcgtcgacctgggcgactgcatc |
| | | ggccgggatgcccgcgaggccatcgaccgcatctttgcgcgcaagtacaacg |
| | | ccacgcacatcaaggtgggccagccgcagtactacctggccacggggggctt |
| | | cctcatcgcgtaccagcccctcctcagcaacacgctcgccgagctgtacgtg |
| | | cgggagtacatgcgggagcaggaccgcaagccccggaatgccacgcccgcgc |
| | | cactgcgggaggcgcccagcgccaacgcgagcgtggagcgcatcaagaccac |
| | | cagcagcatcgagttcgcccggctgcagtttacgtataaccatatacagcgc |
| | | CACgtgaacgacatgctggggcgcatcgccgtcgcgtggtgcgagctgcaga |
| | | accacgagctgacactctggaacgaggcccgcaagctcaaccccaacgccat |
| | | cgccagcgccaccgtcggccggcgggtgagcgcgcgcatgctcggagacgtc |
| | | atggccgtctccacgtgcgtgcccgtcgccccggacaacgtgatcatccaga |
| | | acagcatgcgcgtcagcagccggccggggacgtgctacagccgccccctggt |
| | | cagctttcggtacgaagaccagggcccgctgatcgaggggcagctgggcgag |
| | | aacaacgagctgcgcctcacccgcgacgcgctcgagccgtgcaccgtgggcc |
| | | accggcgctacttcatcttcggcgggggctacgtatacttcgaggagtacgc |
| | | gtactcacaccagctgagtcgcgccgacgtcaccaccgtcagcaccttcatc |
| | | gacctgaacatcaccatgctgcacgaccacgagtttgtgcccctggaggtct |
| | | acacgcgccacgagatcaaggacagcggcctgctgccctacacggaggtcca |
| | | gcgccgcctgcagctgctggacctgcgctttgccgacatcgacacggtcatc |
| | | aactacgaccccaacgccgccatgttcgcggggctgtacgcgttcttcgagg |
| | | ggatgggggacgtggggcgcgcggtcggcaaggtcgtcatgggagtagtggg |
| | | gggcgtggtgagcgccgtcagcggcgtgagctcctttatgtccaaccccttc |
| | | ggggcgcttgccgtggggctactggtcctggccggcctggtcgcggccttct |
| | | tcgccttccgctacgtcctgcgcctgcaacgcaatcccatgaaggccctgta |
| | | gagggggaggaaggcgcggaggggggcgggtttgacgaggccaagttggccg |
| | | aggcccgagaaatgatccgatatatggcattggtgagcGCGatggagcgcac |
| | | ggaacacaaggccagaaagaagggcacgagcgccctgctcagctccaaggtc |
| | | accaacatggtactgcgcaagcgcaacaaagccaggtactcaccgctccaca |
| | | acgaggacgaggccggagacgaagacgagctctgaCGTACGGCTGGAGCCTC |
| | | GGTGGCCTAGCTTCTTGCCCCETGGGCCTCCCCCCAGCCCCTCCTCCCCTTC |
| | | CTGCACCCGTACCCCCGTGGTCTTTGAATAAAGTCTGAGTGGGCGGCAaaaa |
| | | aaaaaaaaaaaaaaaaaaaaaaaaagcatatgactaaaaaaaaaaaaaaaaa |
| | | aaaaaaaaaaaaaaaaaaaaaaaaaaaaaaaaaaaaaaaaaaaaaaaaaaaa |
| | | aAAAAGAAGAGCAAGCTT |
| ARV-HSV-gB-RSN | 611 | MRGGGLICALVVGALVAAVASAAPAAPAAPRASGGVAATVAANGGPASRPPP |
| (HSV-2 glycoprotein | | VPSPATTKARKRKTKKPPKRPEATPPPDANATVAAGHATLRAHLRELVDENA |
| B), Protein sequence | | DAQFYVCPPPTGATVVQFEQPRRCPTRPEGQNYTEGIAVVFKENIAPYKFKA |
| | | TMYYKDVTVSQVWFGHRYSQEMGIFEDRAPVPFEEIIDKINAKGVCRSTAKY |
| | | VRNNMETTAFHRDDHETDMELKPAKFATRTSRGWHTTDLKYNPSRVEAFHRY |
| | | GTTVNCIVEEVDARSVYPYDEFVLATGDFVYMSPFYGYREGSHTEHTSYAAD |
| | | RFKQVDGFYPRQLTTKARATSPTTRNLLTTPKFTVAWDWVPKRPAVCTMTKW |
| | | QEVDEMLRAEYGGSFRFSSDAISTTFTTNLTEYSLSRVDLGDCIGRDAREIA |
| | | DRIFARKYNATHIKVGQPQYYLATGGFLIAYQPLLSNTLAELYVREYMREQD |
| | | RKPRNATPAPLREAPSANASVERIKTTSSIEFARLQFTYNHIQRHVNDMLGR |
| | | IAVAWCELQNHELTLWNEARKLNPNAIASATVGRRVSARMLGDVMAVSTCVP |
| | | VAPDNVIIQNSMRVSSRPGTCYSRPLVSFRYEDQGPLIEGQLGENNELRLTR |
| | | DALEPCTVGHRRYFIYGKGYVYFEEYAYSHQLSRADVTTVSTFIDLNITMLH |
| | | DHEFVPLEVYTRHEIKDSGLLPYTEVQRRLQLLDLRFADIDTVINYDPNAAM |
| | | FAGLYAFFEGMGDVGRAVGKVVMGVVGGVVSAVSGVSSFMSNPFGALAVGLL |
| | | VLAGLVAAFFAFRYVLRLQRNPMKALYPLTLKELKTSDPGGVGGEGEEGAEG |
| | | GGFDEAKLAEAREMIRYMALVSAMERTEHKARKKGTSALLSSKVTNMVLRKR |
| | | NKARYSPLHNEDEAGDEDEL* |
| ARV-HSV-gB-RSN | 612 | GAATTCTAATACGACTCACTATAAGGACATTAGCTTCTGACACAACTGTGTT |
| (HSV-2 glycoprotein | | CACTAGCAACCTCAAACAGCCACCatgcgcggggggggcttgatatgcgcgc |
| B), DNA sequence | | tggtcgtgggggcgctggtggccgcggtggcgtcggcggccccggcggcccc |
| | | cgcggccccccgcgccagcggcggcgtggccgcgaccgtcgcggcgaacggg |
| | | ggacccgcctcccggccgccccccgtcccgagccccgcgaccaccaaggccc |
| | | ggaagcggaaaaccaaaaagccgcccaagcggcccgaggcgaccccgccccc |
| | | cgacgccaacgcgaccgtcgccgccggccacgccacgctgcgcgcgcacctg |
| | | cgggaaCTGGTCGACgagaacgccgatgcccagttttacgtgtgcccacccc |
| | | cgacaggcgccacggtggtgcagtttgagcagccgcgccgctgcccgacgcg |
| | | cccggaggggcagaactacacggagggcatcgcggtggtcttcaaggagaac |
| | | atcgccccgtacaaattcaaggccaccatgtactacaaagacgtgaccgtgt |
| | | cgcaggtgtggttcggccaccgctactcccagtttatggggatattcgagga |
| | | ccgcgcccccgtacccttcgaggagatcatcgacaagataaacgccaagggg |
| | | gtctgccgctccacggccaagtacgtgcggaacaacatggagaccaccgcgt |
| | | ttcaccgggacgaccacgagaccgacatggagctcaagccggcgaagttcgc |
| | | cacgcgcacgagccgggggtggcacaccaccgacctcaagtacaaccccagc |
| | | cgggtggaggcgttccatcggtacggcacgacggtcaactgcatcgtcgagg |
| | | aggtggacgcgcggtcggtgtacccgTATgatgagtttgtgctggcgacggg |
| | | cgactttgtgtacatgtccccgttttacggctaccgggaggggagccacacc |
| | | gagcacaccagctacgccgccgaccgcttcaagcaggtcgacggcttctacc |
| | | cgcgcgacctcaccacgaaggcccgggccacgagcccgacgacccgcaactt |
| | | gctgacgacccccaagtttaccgtggcctgggactgggtgccgaagcgaccg |
| | | gcggtctgcaccatgaccaagtggcaggaggtggacgagatgctccgcgccg |
| | | agtacggcggctccttccgcttctcctccgacgccatcagcaccaccttcac |
| | | caccaacctgaccgagtacagcctcagccgcgtcgacctgggcgactgcatc |
| | | ggccgggatgcccgcgaggccatcgaccgcatctttgcgcgcaagtacaacg |
| | | ccacgcacatcaaggtgggccagccgcagtactacctggccacggggggctt |
| | | cctcatcgcgtaccagcccctcctcagcaacacgctcgccgagctgtacgtg |
| | | cgggagtacatgcgggagcaggaccgcaagccccggaatgccacgcccgcgc |
| | | cactgcgggaggcgcccagcgccaacgcgagcgtggagcgcatcaagaccac |
| | | cagcagcatcgagttcgcccggctgcagtttacgtataaccatatacagcgc |
| | | CACgtgaacgacatgctggggcgcatcgccgtcgcgtggtgcgagctgcaga |
| | | accacgagctgacactctggaacgaggcccgcaagctcaaccccaacgccat |
| | | cgccagcgccaccgtcggccggcgggtgagcgcgcgcatgctcggagacgtc |
| | | atggccgtctccacgtgcgtgcccgtcgccccggacaacgtgatcatccaga |
| | | acagcatgcgcgtcagcagccggccggggacgtgctacagccgccccctggt |
| | | cagctttcggtacgaagaccagggcccgctgatcgaggggcagctgggcgag |
| | | aacaacgagctgcgcctcacccgcgacgcgctcgagccgtgcaccgtgggcc |
| | | accggcgctacttcatcTACggcAAGggctacgtatacttcgaggagtacgc |
| | | gtactcacaccagctgagtcgcgccgacgtcaccaccgtcagcaccttcatc |
| | | gacctgaacatcaccatgctgcacgaccacgagtttgtgcccctggaggtct |
| | | acacgcgccacgagatcaaggacagcggcctgctgccctacacggaggtcca |
| | | gcgccgcctgcagctgctggacctgcgctttgccgacatcgacacggtcatc |
| | | aactacgaccccaacgccgccatgttcgcggggctgtacgcgttcttcgagg |
| | | ggatgggggacgtggggcgcgcggtcggcaaggtcgtcatgggagtagtggg |
| | | gggcgtggtgagcgccgtcagcggcgtgagctcctttatgtccaaccccttc |
| | | ggggcgcttgccgtggggctactggtcctggccggcctggtcgcggccttct |
| | | tcgccttccgctacgtcctgcgcctgcaacgcaatcccatgaaggccctgta |
| | | tccgctcaccctcaaggaactcaagacatccgaccccgggggcgtgggcggg |
| | | gagggggaggaaggcgcggaggggggcgggtttgacgaggccaagttggccg |
| | | aggcccgagaaatgatccgatatatggcattggtgagcGCGatggagcgcac |
| | | ggaacacaaggccagaaagaagggcacgagcgccctgctcagctccaaggtc |
| | | accaacatggtactgcgcaagcgcaacaaagccaggtactcaccgctccaca |
| | | acgaggacgaggccggagacgaagacgagctctgaCGTACGGCTGGAGCCTC |
| | | GGTGGCCTAGCTTCTTGCCCCTTGGGCCTCCCCCCAGCCCCTCCTCCCCTTC |
| | | CTGCACCCGTACCCCCGTGGTCTTTGAATAAAGTCTGAGTGGGCGGCAaaaa |
| | | aaaaaaaaaaaaaaaaaaaaaaaaagcatatgactaaaaaaaaaaaaaaaaa |
| | | aaaaaaaaaaaaaaaaaaaaaaaaaaaaaaaaaaaaaaaaaaaaaaaaaaaa |
| | | aAAAAGAAGAGCAAGCTT |
| ARV-HSV-sgB | 613 | MRGGGLICALVVGALVAAVASAAPAAPRASGGVAATVAANGGPASRPPPVPS |
| (HSV-2 glycoprotein | | PATTRARKRKTKKPPERPEATPPPDANATVAAGHATLRAHLREIKVENADAQ |
| B, soluble form with | | FYVCPPPTGATVVQFEQPRRCPTRPEGQNYTEGIAVVFKENIAPYKFKATMY |
| extracellular domain), | | YKDVTVSQVWFGHRYSQFMGIFEDRAPVPFEEVIDKINAKGVCRSTAKYVRN |
| Protein sequence | | NMETTAFHRDDHETDMELKPAKVATRTSRGWHTTDLKYNPSRVEAFHRYGTT |
| | | VNCIVEEVDARSVYPYDEFVLATGDFVYMSPFYGYREGSHTEHTSYAADRFK |
| | | QVDGFYARDLITKARATSPTTRNLLTTPKFTVAWDWVPKRPAVCTMTKWQEV |
| | | DEMLRAEYGGSFRFSSDAISTTFTTNLTQYSLSRVDLGDCIGRDAREAIDRM |
| | | FARKYNATHIKVGQPQYYLATGGFLIAYQPLLSNTLAELYVREYMREQDRKP |
| | | RNATPAPLREAPSANASVERIKTTSSIEFARLQFTYNHIQRPVNDMLGRIAV |
| | | AWCELQNHELTLWNEARKLNPNAIASATVGRRVSARMLGDVMAVSTCVPVAP |
| | | DNVIVQNSMRVSSRPGTCYSRPLVSFRYEDQGPLIEGQLGENNELRLTRDAL |
| | | EPCTVGHRRYFIFGGGYVYFEEYAYSHQLSRADVTTVSTEIDLNITMLEDHE |
| | | FVPLEVYTRHEIKDSGLLDYTEVQRRNQLHDLRFAAIDTVI* |
| ARV-HSV-sgB | 614 | GAATTCTAATACGACTCACTATAAGGACATTAGCTTCTGACACAACTGTGTT |
| (HSV-2 glycoprotein | | CACTAGCAACCTCAAACAGCCACCatgcgcggggggggcttgatatgcgcgc |
| B, soluble form with | | tggtcgtgggggcgctggtggccgcggtggcgtcggccgccccggcggcccc |
| extracellular domain), | | ccgcgccagcggcggcgtggccgcgaccgtcgcggcgaacgggggacccgcc |
| DNA sequence | | tcccggccgccccccgtcccgagccccgcgaccaccagggcccggaagcgga |
| | | aaaccaaaaagccgcccgagcggcccgaggcgaccccgccccccgacgccaa |
| | | cgcgaccgtcgccgccggccacgccacgctgcgcgcgcacctgcgggaaatc |
| | | aaggtcgagaacgccgatgcccagttttacgtgtgcccacccccgacaggcg |
| | | ccacggtggtgcagtttgagcagccgcgccgctgcccgacgcgcccggaggg |
| | | gcagaactacacggagggcatcgcggtggtcttcaaggagaacatcgccccg |
| | | tacaaattcaaggccaccatgtactacaaagacgtgaccgtgtcgcaggtgt |
| | | ggttcggccaccgctactcccagtttatggggatattcgaggaccgcgcccc |
| | | cgtacccttcgaggaggtgatcgacaagataaacgccaagggggtctgccgc |
| | | tccacggccaagtacgtgcggaacaacatggagaccaccgcgtttcaccggg |
| | | acgaccacgagaccgacatggagctcaagccggcgaaggtcgccacgcgcac |
| | | gagccgggggtggcacaccaccgacctcaagtacaaccccagccgggtggag |
| | | gcgttccatcggtacggcacgacggtcaactgcatcgtcgaggaggtggacg |
| | | cgcggtcggtgtacccgTATgatgagtttgtgctggcgacgggcgactttgt |
| | | gtacatgtccccgttttacggctaccgggaggggagccacaccgagcacacc |
| | | agctacgccgccgaccgcttcaagcaggtcgacggcttctacgcgcgcgacc |
| | | tcaccacgaaggcccgggccacgagcccgacgacccgcaacttgctgacgac |
| | | ccccaagtttaccgtggcctgggactgggtgccgaagcgaccggcggtctgc |
| | | accatgaccaagtggcaggaggtggacgagatgctccgcgccgagtacggcg |
| | | gctccttccgcttctcctccgacgccatcagcaccaccttcaccaccaacct |
| | | gacccagtacagcctcagccgcgtcgacctgggcgactgcatcggccgggat |
| | | gcccgcgaggccatcgaccgcatgtttgcgcgcaagtacaacgccacgcaca |
| | | tcaaggtgggccagccgcagtactacctggccacggggggcttcctcatcgc |
| | | gtaccagcccctcctcagcaacacgctcgccgagctgtacgtgcgggagtac |
| | | atgcgggagcaggaccgcaagccccggaatgccacgcccgcgccactgcggg |
| | | aggcgcccagcgccaacgcgagcgtggagcgcatcaagaccaccagcagcat |
| | | cgagttcgcccggctgcagtttacgtataaccatatacagcgccccgtgaac |
| | | gacatgctggggcgcatcgccgtcgcgtggtgcgagctgcagaaccacgagc |
| | | tgacactctggaacgaggcccgcaagctcaaccccaacgccatcgccagcgc |
| | | caccgtcggccggcgggtgagcgcgcgcatgctcggagacgtcatggccgtc |
| | | tccacgtgcgtgcccgtcgccccggacaacgtgatcgtgcagaacagcatgc |
| | | gcgtcagcagccggccggggacgtgctacagccgccccctggtcagctttcg |
| | | gtacgaagaccagggcccgctgatcgaggggcagctgggcgagaacaacgag |
| | | ctgcgcctcacccgcgacgcgctcgagccgtgcaccgtgggccaccggcgct |
| | | acttcatcttcggcgggggctacgtatacttcgaggagtacgcgtactcaca |
| | | ccagctgagtcgcgccgacgtcaccaccgtcagcaccttcatcgacctgaac |
| | | atcaccatgctggaggaccacgagtttgtgcccctggaggtctacacgcgcc |
| | | acgagatcaaggacagcggcctgctggactacacggaggtccagcgccgcaa |
| | | ccagctgcacgacctgcgctttgccgccatcgacacggtcatctgaCGTACG |
| | | GCTGGAGCCTCGGTGGCCTAGCTTCTTGCCCCTTGGGCCTCCCCCCAGCCCC |
| | | TCCTCCCCTTCCTGCACCCGTACCCCCGTGGTCTTTGAATAAAGTCTGAGTG |
| | | GGCGGCAaaaaaaaaaaaaaaaaaaaaaaaaaaaaagcatatgactaaaaaa |
| | | aaaaaaaaaaaaaaaaaaaaaaaaaaaaaaaaaaaaaaaaaaaaaaaaaaaa |
| | | aaaaaaaaaaaaAAAAGAAGAGCAAGCTT |
| ARV-HSV-gD-WT | 615 | MGRLTSGVGTAALLVVAVGLRVVCAKYALADPSLKMADPNRFRGKNLPVLDQ |
| (HSV-2 glycoprotein | | LTDPPGVKRVYHIQPSLEDPFQPPSIPITVYYAVLERACRSVLLHAPSEAPQ |
| D wildtype), Protein | | IVRGASDEARKHTYNLTIAWYRMGDNCAIPITVMEYTECPYNKSLGVCPIRT |
| sequence | | QPRWSYYDSFSAVSEDNLGFLMHAPAFETAGTYLRLVKINDWTEITQFILEH |
| | | RARASCKYALPLRIPPAACLTSKAYQQGVTVDSIGMLPRFIPENQRTVALYS |
| | | LKIAGWHGPKPPYTSTILPPELSDTTNATQPELVPEDPEDSALLEDPAGTVS |
| | | SQIPPNWHIPSIQDVAPHHAPAAPSNPGLIIGALAGSTLAVLVIGGIAFWVR |
| | | RRAQMAPKRLRLPHIRDDDAPPSHQPLFY* |
| ARV-HSV-gD-WT | 616 | GAATTCGGCTTTAATACGACTCACTATAAGGACATTAGCTTCTGACACAACT |
| (HSV-2 glycoprotein | | GTGTTCACTAGCAACCTCAAACAGCCACCatggggcgattgacctccggcgt |
| D wildtype), DNA | | cgggacggcggccctgctagtagtcgcggtgggactccgcgtcgtctgcgcc |
| sequence | | aaatacgccttagcagaccccagccttaagatggccgatcccaatcgatttc |
| | | gcgggaagaaccttccggtattggaccagctgaccgacccccccggggtgaa |
| | | gcgagtataccacatacagccgagcctggaggacccgttccagccccccagc |
| | | atcccgatcacagtgtactacgcagtgctggaacgagcctgccgcagcgtgc |
| | | tcctacatgccccaagcgaggccccccagatcgtgcgcggggcatccgacga |
| | | ggcccgaaagcacacgtacaacctgaccatcgcctggtatcgcatgggagac |
| | | aattgcgcaatccccatcacggtaatggaatacaccgagtgcccctacaaca |
| | | agagcttgggggtctgccccatccgaacgcagccccgctggagctactatga |
| | | cagctttagcgccgtcagcgaggataacctgggattcctgatgcacgccccc |
| | | gccttcgagaccgcgggaacgtacctgcggctagtgaagataaacgactgga |
| | | cggagatcacacaatttatcctggagcaccgggcccgcgcctcctgcAAGta |
| | | cgcactccccctgcgcatccccccggcagcgtgcctcaccagcaaggcctac |
| | | caacagggcgtgacggtcgacagcatcgggatgctaccccgctttatccccg |
| | | aaaaccagcgcaccgtcgccctatacagcttaaaaatcgccggctggcacgg |
| | | ccccaagcccccgtacaccagcaccctgctgccgccggagctttccgacacc |
| | | accaacgccacgcaacccgaactcgtaccggaagaccccgaggacagcGCGc |
| | | tcttagaggatcccgccgggacggtgtcatcacagatccccccaaactggca |
| | | catcccgtcgatccaggacgtcgcgccgcaccacgcccccgccgcccccagc |
| | | aacccgggcctgatcatcggcgcgctggccggcagtaccctggcggtgctgg |
| | | tcatcggcggaatagcgttttgggtacgccgccgcgcacagatggcccccaa |
| | | gcgcctacgactcccccacatccgggatgacgacgcgccccccagccaccag |
| | | ccattgttttactgaCGTACGGCTGGAGCCTCGGTGGCCTAGCTTCTTGCCC |
| | | CTTGGGCCTCCCCCCAGCCCCECCTCCCCTTCCTGCACCCGTACCCCCGTGG |
| | | TCTTTGAATAAAGTCTGAGTGGGCGGCAaaaaaaaaaaaaaaaaaaaaaaaa |
| | | aaaaagcatatgactaaaaaaaaaaaaaaaaaaaaaaaaaaaaaaaaaaaaa |
| | | aaaaaaaaaaaaaaaaaaaaaaaaaaaaaaaaaAAAAGAAGAGCAAGCTT |
| ARV-HSV-gD(HSV- | 617 | MGRLTSGVGTAALLVVAVGLRVVCAKYALADPSLKMADPNRFRGKNLPVLDQ |
| 2 glycoprotein D with | | LTDPPGVKRVYHIQPSLEDPFQPPSIPITVYYAVLERACRSVLLHAPSEAPQ |
| two AA | | IVRGASDEARKHTYNLTIAWYRMGDNCAIPITVMEYTECPYNKSLGVCPIRT |
| substitutions), Protein | | QPRWSYYDSFSAVSEDNLGFLMHAPAFETAGTYLRLVKINDWTEITQFILEH |
| sequence | | RARASCCYALPLRIPPAACLISKAYQQGVTVDSIGMLPRFIPENQRTVALYS |
| | | LKIAGWHGPKPPYTSTALPPELSDTTNATQPELVPEDPEDSCLLEDPAGTVS |
| | | SQIPPNWHIPSIQDVAPHHAPAAPSNPGLIIGALAGSTLAVLVIGGIAFWVR |
| | | RRAQMAPKRLRLPHIRDDDAPPSHQPLFY* |
| ARV-HSV-gD(HSV- | 618 | GAATTCGGCTTTAATACGACTCACTATAAGGACATTAGCTTCTGACACAACT |
| 2 glycoprotein D with | | GTGTTCACTAGCAACCTCAAACAGCCACCatggggcgattgacctccggcgt |
| two AA | | cgggacggcggccctgctagtagtcgcggtgggactccgcgtcgtctgcgcc |
| substitutions), DNA | | aaatacgccttagcagaccccagccttaagatggccgatcccaatcgatttc |
| sequence | | gcgggaagaaccttccggtattggaccagctgaccgacccccccggggtgaa |
| | | gcgagtataccacatacagccgagcctggaggacccgttccagccccccagc |
| | | atcccgatcacagtgtactacgcagtgctggaacgagcctgccgcagcgtgc |
| | | tcctacatgccccaagcgaggccccccagatcgtgcgcggggcatccgacga |
| | | ggcccgaaagcacacgtacaacctgaccatcgcctggtatcgcatgggagac |
| | | aattgcgcaatccccatcacggtaatggaatacaccgagtgcccctacaaca |
| | | agagcttgggggtctgccccatccgaacgcagccccgctggagctactatga |
| | | cagctttagcgccgtcagcgaggataacctgggattcctgatgcacgccccc |
| | | gccttcgagaccgcgggaacgtacctgcggctagtgaagataaacgactgga |
| | | cggagatcacacaatttatcctggagcaccgggcccgcgcctcctgctgcta |
| | | cgcactccccctgcgcatccccccggcagcgtgcctcaccagcaaggcctac |
| | | caacagggcgtgacggtcgacagcatcgggatgctaccccgctttatccccg |
| | | aaaaccagcgcaccgtcgccctatacagcttaaaaatcgccggctggcacgg |
| | | ccccaagcccccgtacaccagcaccctgctgccgccggagctttccgacacc |
| | | accaacgccacgcaacccgaactcgtaccggaagaccccgaggacagctgcc |
| | | tcttagaggatcccgccgggacggtgtcatcacagatccccccaaactggca |
| | | catcccgtcgatccaggacgtcgcgccgcaccacgcccccgccgcccccagc |
| | | aacccgggcctgatcatcggcgcgctggccggcagtaccctggcggtgctgg |
| | | tcatcggcggaatagcgttttgggtacgccgccgcgcacagatggcccccaa |
| | | gcgcctacgactcccccacatccgggatgacgacgcgccccccagccaccag |
| | | ccattgttttactgaCGTACGGCTGGAGCCTCGGTGGCCTAGCTTCTTGCCC |
| | | CTTGGGCCTCCCCCCAGCCCCTCCTCCCCTTCCTGCACCCGTACCCCCGTGG |
| | | TCTTTGAATAAAGTCTGAGTGGGCGGCAaaaaaaaaaaaaaaaaaaaaaaaa |
| | | aaaaagcatatgactaaaaaaaaaaaaaaaaaaaaaaaaaaaaaaaaaaaaa |
| | | aaaaaaaaaaaaaaaaaaaaaaaaaaaaaaaaaAAAAGAAGAGCAAGCTT |
| ARV-HSV-sgD | 619 | MTRLTVLALLAGLLASSRAKYALADPSLKMADPNRFRGKNLPVLDQLTDPPG |
| (HSV-2 glycoprotein | | VKRVYHIQPSLEDPFQPPSIPITVYYAVLERACRSVLLHAPSEAPQIVRGAS |
| D, soluble format with | | DEARKHTYNLTIAWYRMGDNCAIPITVMEYTECPYNKSLGVCPIRTQPRWSY |
| extracellular domain), | | YDSFSAVSEDNLGFLMHAPAFETAGTYLRLVKINDWTEITQFILEHRARASC |
| Protein sequence | | CYALPLRIPPAACLISKAYQQGVTVDSIGMLPRFIPENQRTVALYSLKIAGW |
| | | HGPKPPYTSTLLPPELSDTTNATQPELVPEDPEDSCLLEDPAGTVSSQIPPN |
| | | WHIPSIQDVAPHH* |
| ARV-HSV-sgD | 620 | GAATTCGGCTTTAATACGACTCACTATAAGGACATTAGCTTCTGACACAACT |
| (HSV-2 glycoprotein | | GTGTTCACTAGCAACCTCAAACAGCCACCatgacccgcctgaccgtgctggc |
| D, soluble format with | | cctgctggccggcctgctggcctcctcccgcgccaaatacgccttagcagac |
| extracellular domain), | | cccagccttaagatggccgatcccaatcgatttcgcgggaagaaccttccgg |
| DNA sequence | | tattggaccagctgaccgacccccccggggtgaagcgagtataccacataca |
| | | gccgagcctggaggacccgttccagccccccagcatcccgatcacagtgtac |
| | | tacgcagtgctggaacgagcctgccgcagcgtgctcctacatgccccaagcg |
| | | aggccccccagatcgtgcgcggggcatccgacgaggcccgaaagcacacgta |
| | | caacctgaccatcgcctggtatcgcatgggagacaattgcgcaatccccatc |
| | | acggtaatggaatacaccgagtgcccctacaacaagagcttgggggtctgcc |
| | | ccatccgaacgcagccccgctggagctactatgacagctttagcgccgtcag |
| | | cgaggataacctgggattcctgatgcacgcccccgccttcgagaccgcggga |
| | | acgtacctgcggctagtgaagataaacgactggacggagatcacacaattta |
| | | tcctggagcaccgggcccgcgcctcctgctgctacgcactccccctgcgcat |
| | | ccccccggcagcgtgcctcaccagcaaggcctaccaacagggcgtgacggtc |
| | | gacagcatcgggatgctaccccgctttatccccgaaaaccagcgcaccgtcg |
| | | ccctatacagcttaaaaatcgccggctggcacggccccaagcccccgtacac |
| | | cagcaccctgctgccgccggagctttccgacaccaccaacgccacgcaaccc |
| | | gaactcgtaccggaagaccccgaggacagctgcctcttagaggatcccgccg |
| | | ggacggtgtcatcacagatccccccaaactggcacatcccgtcgatccagga |
| | | cgtcgcgccgcaccactgaCGTACGGCTGGAGCCTCGGTGGCCTAGCTTCTT |
| | | GCCCCTTGGGCCTCCCCCCAGCCCCTCCTCCCCTTCCTGCACCCGTACCCCC |
| | | GTGGTCTTTGAATAAAGTCTGAGTGGGCGGCAaaaaaaaaaaaaaaaaaaaa |
| | | aaaaaaaaagcatatgactaaaaaaaaaaaaaaaaaaaaaaaaaaaaaaaaa |
| | | aaaaaaaaaaaaaaaaaaaaaaaaaaaaaaaaaaaaaAAAAGAAGAGCAAGC |
| | | TT |
| ARV-HSV-gC (HSV- | 621 | MRMQLLLLIALSLALVINSASPGRTITVGPRGNASNAAPSASPRNASAPRTT |
| 2 glycoprotein C), | | PTPPQPRKATKSKASTAKPAPPPKTGPPKISSEPVRCNRHDPLARYGSRVQI |
| Protein sequence | | RCRFPNSTRTEFRLQIWRYATATDAEIGTAPSELLVMVNVSAPPGGQLVYDS |
| | | APNRTDPHVIWAEGAGPGASPRLYSVVGPLGRQRLIIEELTLETQGMYYWVW |
| | | GRTDRPSAYGTWVRVRVFRPPSLTIHPHAVLEGQPFKATCTAATYYPGNRAE |
| | | FVWFEDGRRVFDPAQIHTQTQENPDGFSTVSTVTSAAVGGQGPPRIFTCQLT |
| | | WHRDSVSFSRRNASGTASVLPRPTITMEFTGDHAVCTAGCVPEGVTFAWFLG |
| | | DDSSPAEKVAVASQTSCGRPGTATIRSTLPVSYEQTEYICRLAGYPDGIPVL |
| | | EHHGSHQPPPRQPTERQVIRAVEGAGIGVAVLVAVVLAGTAVVYLTHASSVR |
| | | YRRLR* |
| ARV-HSV-gC (HSV- | 622 | GAATTCGGCTTTAATACGACTCACTATAAGGACATTAGCTTCTGACACAACT |
| 2 glycoprotein C), | | GTGTTCACTAGCAACCTCAAACAGCCACCATGCGCATGCAGCTGCTGCTGCT |
| DNA sequence | | GATCGCCCTGTCCCTGGCCCTGGTGACCAACTCCGCCTCCCCCGGCCGCACC |
| | | ATCACCGTGGGCCCCCGCGGCAACGCCTCCAACGCCGCCCCCTCCGCCTCCC |
| | | CCCGCAACGCCTCCGCCCCCCGCACCACCCCCACCCCCCCCCAGCCCCGCAA |
| | | GGCCACCAAGTCCAAGGCCTCCACCGCCAAGCCCGCCCCCCCCCCCAAGACC |
| | | GGCCCCCCCAAGACCTCCTCCGAGCCCGTGCGCTGCAACCGCCACGACCCCC |
| | | TGGCCCGCTACGGCTCCCGCGTGCAGATCCGCTGCCGCTTCCCCAACTCCAC |
| | | CCGCACCGAGTTCCGCCTGCAGATCTGGCGCTACGCCACCGCCACCGACGCC |
| | | GAGATCGGCACCGCCCCCTCCCTGGAGGAGGTGATGGTGAACGTGTCCGCCC |
| | | CCCCCGGCGGCCAGCTGGTGTACGACTCCGCCCCCAACCGCACCGACCCCCA |
| | | CGTGATCTGGGCCGAGGGCGCCGGCCCCGGCGCCTCCCCCCGCCTGTACTCC |
| | | GTGGTGGGCCCCCTGGGCCGCCAGCGCCTGATCATCGAGGAGCTGACCCTGG |
| | | AGACCCAGGGCATGTACTACTGGGTGTGGGGCCGCACCGACCGCCCCTCCGC |
| | | CTACGGCACCTGGGTGCGCGTGCGCGTGTTCCGCCCCCCCTCCCTGACCATC |
| | | CACCCCCACGCCGTGCTGGAGGGCCAGCCCTTCAAGGCCACCTGCACCGCCG |
| | | CCACCTACTACCCCGGCAACCGCGCCGAGTTCGTGTGGTTCGAGGACGGCCG |
| | | CCGCGTGTTCGACCCCGCCCAGATCCACACCCAGACCCAGGAGAACCCCGAC |
| | | GGCTTCTCCACCGTGTCCACCGTGACCTCCGCCGCCGTGGGCGGCCAGGGCC |
| | | CCCCCCGCACCTTCACCTGCCAGCTGACCTGGCACCGCGACTCCGTGTCCTT |
| | | CTCCCGCCGCAACGCCTCCGGCACCGCCTCCGTGCTGCCCCGCCCCACCATC |
| | | ACGATGGAGTTCACCGGCGACCACGCCGTGTGCACCGCCGGCTGCGTGCCCG |
| | | AGGGCGTGACCTTCGCCTGGTTCCTGGGCGACGACTCCTCCCCCGCCGAGAA |
| | | GGTGGCCGTGGCCTCCCAGACCTCCTGCGGCCGCCCCGGCACCGCCACCATC |
| | | CGCTCCACCCTGCCCGTGTCCTACGAGCAGACCGAGTACATCTGCCGCCTGG |
| | | CCGGCTACCCCGACGGCATCCCCGTGCTGGAGCACCACggcagtcaccagcc |
| | | cccgccgcgggaccccaccgagcggcaggtgatccgggcggtggagggggcg |
| | | gggatcggagtggctgtccttgtcgcggtggttctggccgggaccgcggtag |
| | | tgtacctcacccacgcctcctcggtgcgctatcgtcggctgcggtaaCGTAC |
| | | GGCTGGAGCCTCGGTGGCCTAGCTTCTTGCCCCTTGGGCCTCCCCCCAGCCC |
| | | CTCCTCCCCTTCCTGCACCCGTACCCCCGTGGTCTTTGAATAAAGTCTGAGT |
| | | GGGCGGCAaaaaaaaaaaaaaaaaaaaaaaaaaaaaagcatatgactaaaaa |
| | | aaaaaaaaaaaaaaaaaaaaaaaaaaaaaaaaaaaaaaaaaaaaaaaaaaaa |
| | | aaaaaaaaaaaaaAAAAGAAGAGCAAGCTT |
| ARV-HSV-gE (HSV- | 623 | MRMQLLLLIALSLALVINSRISWKRVTSGEDVVLLPAPAGPEERTRAHKLLW |
| 2 glycoprotein E), | | AAEPLDACGPLRPSWVALWPPRRVLETVVDAACMRAPEPLAIAYSPPFPAGD |
| Protein sequence | | EGLYSELAWRDRVAVVNESLVEYGALETDSGLYTLSVVGLSDEARQVASVVL |
| | | VVEPAPVPTPTPDDYDEEDDAGVSERTPVSVPPPTPPRRPPVAPPTHPRVIP |
| | | EVSHVRGVTVHMETPEAILFAPGETFGTNVSIHAIAHDDGPYAMDVVWMRFD |
| | | VPSSCAEMRIYEACLYHPQLPECLSPADAPCAVSSWAYRLAVRSYAGCSRTT |
| | | PPPRCFAEARMEPVPGLAWLASTVNLEFQHASPQHAGLYLCVVYVDDHIHAW |
| | | GHMTISTAAQYRNAVVEQHLPQRQPEPVEPTRPHVRAPHPAPSARGPERLGA |
| | | VLGAALLLAALGLSAWACMTCWRRRSWRAVKSRA* |
| ARV-HSV-gE (HSV- | 624 | GAATTCTAATACGACTCACTATAAGGACATTAGCTTCTGACACAACTGTGTT |
| 2 glycoprotein E), | | CACTAGCAACCTCAAACAGCCACCATGCGCATGCAGCTGCTGCTGCTGATCG |
| DNA sequence | | CCCTGTCCCTGGCCCTGGTGACCAACTCCCGCACCTCCTGGAAGCGCGTGAC |
| | | CTCCGGCGAGGACGTGGTGCTGCTGCCCGCCCCCGCCGGCCCCGAGGAGCGC |
| | | ACCCGCGCCCACAAGCTGCTGTGGGCCGCCGAGCCCCTGGACGCCTGCGGCC |
| | | CCCTGCGCCCCTCCTGGGTGGCCCTGTGGCCCCCCCGCCGCGTGCTGGAGAC |
| | | CGTGGTGGACGCCGCCTGCATGCGCGCCCCCGAGCCCCTGGCCATCGCCTAC |
| | | TCCCCCCCCTTCCCCGCCGGCGACGAGGGCCTGTACTCCGAGCTGGCCTGGC |
| | | GCGACCGCGTGGCCGTGGTGAACGAGTCCCTGGTGATCTACGGCGCCCTGGA |
| | | GACCGACTCCGGCCTGTACACCCTGTCCGTGGTGGGCCTGTCCGACGAGGCC |
| | | CGCCAGGTGGCCTCCGTGGTGCTGGTGGTGGAGCCCGCCCCCGTGCCCACCC |
| | | CCACCCCCGACGACTACGACGAGGAGGACGACGCCGGCGTGTCCGAGCGCAC |
| | | CCCCGTGTCCGTGCCCCCCCCCACCCCCCCCCGCCGCCCCCCCGTGGCCCCC |
| | | CCCACCCACCCCCGCGTGATCCCCGAGGTGTCCCACGTGCGCGGCGTGACCG |
| | | TGCACATGGAGACCCCCGAGGCCATCCTGTTCGCCCCCGGCGAGACCTTCGG |
| | | CACCAACGTGTCCATCCACGCCATCGCCCACGACGACGGCCCCTACGCAATG |
| | | GACGTGGTGTGGATGCGCTTCGACGTGCCCTCCTCCTGCGCCGAGATGCGCA |
| | | TCTACGAGGCCTGCCTGTACCACCCCCAGCTGCCCGAGTGCCTGTCCCCCGC |
| | | CGACGCCCCCTGCGCCGTGTCCTCCTGGGCCTACCGCCTGGCCGTGCGCTCC |
| | | TACGCCGGCTGCTCCCGCACCACCCCCCCCCCCCGCTGCTTCGCCGAGGCCC |
| | | GCATGGAGCCCGTGCCCGGCCTGGCCTGGCTGGCCTCCACCGTGAACCTGGA |
| | | GTTCCAGCACGCCTCCCCCCAGCACGCCGGCCTGTACCTGTGCGTGGTGTAC |
| | | GTGGACGACCACATCCACGCCTGGGGCCACATGACCATCTCCACCGCCGCCC |
| | | AGTACCGCAACGCCGTGGTGGAGCAGCACCTGCCCCAGCGCCAGCCCGAGCC |
| | | CGTGGAGCCCACCCGCCCCCACGTGCGCGCCccccatcccgcgccctccgcg |
| | | cgcggcccgctgcgcctcggggcggtgctgggggcggccctgttgctggccg |
| | | ccctcgggctgtccgcgtgggcgtgcatgacctgctggcgcaggcgctcctg |
| | | gcgggcggttaaaagccgggccTAACGTACGGCTGGAGCCTCGGTGGCCTAG |
| | | CTTCTTGCCCCTTGGGCCTCCCCCCAGCCCCTCCTCCCCTTCCTGCACCCGT |
| | | ACCCCCGTGGTCTTTGAATAAAGTCTGAGTGGGCGGCAaaaaaaaaaaaaaa |
| | | aaaaaaaaaaaaaaagcatatgactaaaaaaaaaaaaaaaaaaaaaaaaaaa |
| | | aaaaaaaaaaaaaaaaaaaaaaaaaaaaaaaaaaaaaaaaaaaAAAAGAAGA |
| | | GCAAGCTT |
| ARV-HSV-MTE | 625 | MGFEAGLMDAATPPARPPAERQGSPTPADATRYLPIAGASSVVALAPYVNKT |
| (Multi-T-cell- | | VTGDCLPVLDMETGHIGAYVVLVDQTGNVADLLRAAAPAWSRRTLLPEHARN |
| Epitopes derived from | | CVRPPDYPTPPASEWNSLWMTPVGNMLFDQGTLVGALDFGAGPMRARPRGEV |
| HSV-1 and HSV-2); | | RFLHYDEAGYALYRDSSSDDDESRDTARPRRSASVAGSHGPGPARAPPPPGG |
| Protein sequence | | PVGAGGRSHAPPARTPKMTRGAPKASATPAIDPARGRRPAQASGPHETITAL |
| | | VGAARHASPFERVRCLLLRSEGRKSRRPLTTFGSGAAAPAWSRRTLLPEHHN |
| | | LFLWEDQTLLRATKNACPLLIFDRTRKFVLACPYADRLDNRLQLGMLIPGAV |
| | | KRFGGHYMESVFQMYTRIAILGILVHLRIRTREASFEEETHFTQYLIYDASP |
| | | LKGLSAMKTSNALCVRGARPFSHFPALMLEYFCRCAREESKRVDTSMSLADF |
| | | HGEEFEKLYETQYLIYDASPLKGLSLTRMAEYDRVHIYYNHRISNQALLRMA |
| | | CEVRQGNWTGAPDVSALGAQGMGFLVDAIVRVAINGLLGLADTVVACVACRR |
| | | LGPADRRFVALSGSLEVWASDSLNNEYLRLAAQREAAGVYDAVRIWGP* |
| ARV-HSV-MTE | 626 | GAATTCGGCTTTAATACGACTCACTATAAGGACATTAGCTTCTGACACAACT |
| (Multi-T-cell- | | GTGTTCACTAGCAACCTCAAACAGCCACCATGggcTTCGAGGCCGGCCTGAT |
| Epitopes derived from | | GGACGCCGCGACCCCGCCGGCCCGACCGCCCGCGGAACGGCAAGGCAGCCCG |
| HSV-1 and HSV-2); | | ACCCCCGCAGACGCCACCCGGTACCTGCCGATCGCCGGCGCCAGCAGCGTCG |
| DNA sequence | | TGGCGCTGGCCCCCTACGTGAACAAGACCGTGACCGGCGACTGCCTCCCGGT |
| | | CCTGGACATGGAAACCGGCCACATCGGCGCATACGTGGTGCTGGTGGACCAG |
| | | ACAGGCAACGTGGCCGACCTGCTGCGGGCCGCAGCCCCCGCGTGGAGCAGGC |
| | | GGACCCTACTGCCCGAGCACGCCCGCAACTGCGTGCGACCCCCGGACTACCC |
| | | GACCCCGCCAGCGAGCGAGTGGAACAGCCTGTGGATGACCCCGGTGGGCAAC |
| | | ATGCTGTTCGACCAGGGCACACTGGTGGGCGCCCTCGACTTCGGCGCCGGCC |
| | | CGATGAGAGCCCGACCAAGAGGCGAGGTGCGCTTCCTGCACTACGACGAGGC |
| | | CGGGTACGCCCTGTACAGGGACAGCAGCAGCGACGACGACGAGAGCCGGGAC |
| | | ACCGCCCGCCCCAGACGGAGCGCCAGCGTGGCCGGGAGCCACGGCCCGGGCC |
| | | CCGCCAGAGCGCCGCCGCCGCCAGGGGGGCCGGTGGGGGCCGGGGGACGAAG |
| | | CCACGCCCCGCCGGCGAGAACACCGAAGATGACGCGCGGCGCCCCGAAGGCC |
| | | AGCGCGACCCCCGCCACCGACCCGGCCCGGGGACGCCGCCCGGCCCAGGCCA |
| | | GCGGCCCGCACGAAACAATCACAGCCCTGGTGGGCGCCGCGCGGCACGCCAG |
| | | CCCCTTCGAGCGGGICAGGTGCCTGCTGCTCAGAAGCGAGGGCCGGAAAAGC |
| | | CGCAGACCGCTAACGACCTTCGGCAGCGGCGCCGCGGCCCCGGCCTGGAGCC |
| | | GGCGAACCCTGCTGCCCGAGCACCACAACCIGTTCCTGTGGGAGGACCAGAC |
| | | CCTGCTGCGGGCCACCAAGAACGCCTGCCCCCTCCTGATCTTCGACAGAACC |
| | | CGCAAGTTCGTGCTGGCCTGCCCCTACGCCGACAGGCTGGACAACCGCCTGC |
| | | AACTGGGAATGCTGATCCCGGGAGCCGTGAAGCGGTTCGGCGGCCACTACAT |
| | | GGAAAGCGTGTTCCAGATGTACACCCGGATCGCGATCCTGGGCATCCTGGTG |
| | | CACCTGCGGATCAGAACCCGGGAGGCGAGCTTCGAAGAAGAAACCCACTTCA |
| | | CCCAGTACCTGATCTACGACGCCAGCCCGCTGAAGGGCCTGAGCGCCATGAA |
| | | AACAAGCAACGCGCTGTGCGTAAGGGGCGCCCGGCCATTCAGCCACTTCCCG |
| | | GCGCTGATGCTGGAGTACTTCTGCAGATGCGCCAGAGAAGAGAGCAAACGCG |
| | | TGGACACAAGCATGAGCCTGGCAGACTICCACGGCGAGGAGTTCGAGAAGCT |
| | | GTACGAGACACAGTACCTGATCTACGACGCCAGCCCACTGAAGGGCCTGAGC |
| | | CTGACCCGGATGGCAGAGTACGACCGGGTGCACATCTACTACAACCACCGGA |
| | | TCAGCAACCAGGCGCTGCTGAGGATGGCCTGCGAGGTGCGCCAGGGCAACTG |
| | | GACCGGGGCGCCGGACGTGAGCGCGCTGGGCGCGCAGGGCATGGGCTTCCTG |
| | | GTGGACGCGATCGTCCGGGTGGCGATAAACGGCCTCCTGGGGCTGGCGGACA |
| | | CCGTGGTGGCCTGCGTGGCGTGCAGACGCCTGGGCCCCGCGGACAGACGGTT |
| | | CGTGGCCCTGAGCGGCAGCCTGGAGGTGTGGGCCAGCGACAGCCTGAACAAC |
| | | GAGTACCTGCGCCTGGCGGCCCAGCGGGAGGCGGCCGGCGTGTACGACGCGG |
| | | TCCGGACCTGGGGCCCGTGACGTACGGCTGGAGCCTCGGTGGCCTAGCTTCT |
| | | TGCCCCTTGGGCCTCCCCCCAGCCCCTCCTCCCCTTCCTGCACCCGTACCCC |
| | | CGTGGTCTTTGAATAAAGTCTGAGTGGGCGGCAaaaaaaaaaaaaaaaaaaa |
| | | aaaaaaaaaaaaaaaaaaaaaaaaaaaaaaaaaaaaaaAAAAGAAGAGCAAG |
| | | aaaaaaaaaaaaaaaaaaaaaaaaaaaaaaaaaaaaaaAAAAGAAGAGCAAG |
| | | CTT |
| ARV-HSV-UL19UD | 627 | MGRLSMENAVGTVCHPSLMNIDAAVGGVNHDPVEAANPYGAYVAAPAGPGAD |
| (trucated HSV-2 | | MQQRFLNAWRQRLAHGRVRWVAECQMTAEQEMQPDNANLALELHPAFDFFAG |
| UL19 UD sequence), | | VADVELPGGEVPPAGPGAIQATWRVVNGNLPLALCPVAFRDARGLELGVGRH |
| Protein sequence | | AMAPATIAAVRGAFEDRSYPAVFYLLQAAIHGSEHVFCALARLVTQCITSYW |
| | | NNTRCAAFVNDYSLVSYIVTYLGGDLPEECMAVYRDLVAHVEALAQLVDDFT |
| | | LPGPELGGQAQAELNHLMRDPALLPPLVWDCDGLMRHAALDRHRDCRIDAGG |
| | | HEPVYAAACNVATADFNRNDGRLLHNTQARAADAADDRPHRPADWTVHHKIY |
| | | YYVLVPAFSRGRCCTAGVRFDRVYATLQNMVVPEIAPGEECPSDPVTDPAHP |
| | | LHPANLVANTVNAMFHNGRVVVDGPAMLTLQVLAHNMAERTTALLCSAAPDA |
| | | GANTASTANMRIFDGALHAGVLLMAPQHLDHTIQNGEYFYVLPVHALFAGAD |
| | | HVANAPNFPPALRDLARHVPLVPPALGANYESSIRQPVVQHARESAAGENAL |
| | | TYALMAGYFKMSPVALYIIQLKTGLIIPGFGFTVVR* |
| ARV-HSV-UL19UD | 628 | GAATTCGGCTTTAATACGACTCACTATAAGGACATTAGCTTCTGACACAACT |
| (truncated HSV-2 | | GTGTTCACTAGCAACCTCAAACAGCCACCATGggcAGGCTGAGCATGGAAAA |
| UL19 UD sequence), | | CGCGGTGGGCACAGTCTGCCACCCCAGCCTGATGAACATCGACGCCGCCGTG |
| DNA sequence | | GGCGGCGTGAACCACGACCCCGTGGAAGCCGCCAACCCGTATGGCGCCTACG |
| | | TGGCCGCCCCAGCCGGCCCCGGCGCCGACATGCAGCAGCGGTTCCTGAACGC |
| | | CTGGCGGCAACGGCTGGCCCACGGACGGGTGAGATGGGTGGCCGAGTGCCAG |
| | | ATGACCGCGGAGCAGTTCATGCAGCCGGACAACGCCAACCTGGCCCTGGAGC |
| | | TGCACCCCGCCTTCGACTTCTTCGCCGGAGTGGCCGACGTGGAGCTGCCGGG |
| | | CGGAGAGGTGCCGCCGGCCGGACCGGGCGCCATCCAGGCAACGTGGCGGGTA |
| | | GTGAACGGCAACCTGCCCCTGGCCCTCTGCCCCGTGGCCTTCCGGGACGCCA |
| | | GAGGACTCGAGCTGGGCGTAGGCAGACACGCGATGGCCCCGGCGACCATCGC |
| | | GGCGGTGCGCGGCGCATTCGAGGACCGGAGCTACCCCGCCGTGTTCTACCTG |
| | | CTGCAGGCCGCCATCCACGGAAGCGAACACGTGTTCTGCGCCCTCGCCCGGC |
| | | TGGTCACCCAATGCATCACGAGCTACTGGAACAACACCAGATGCGCCGCGTT |
| | | CGTGAACGACTACAGCCTCGTGAGCTACATCGTGACCTACCTGGGCGGCGAC |
| | | CTGCCGGAGGAGTGCATGGCGGTCTACCGAGACCTGGTCGCCCACGTGGAGG |
| | | CCCTGGCCCAGCTGGTGGACGACTTCACCCTGCCCGGCCCGGAGCTGGGCGG |
| | | GCAGGCCCAGGCCGAGCTGAACCACCTGATGCGGGACCCGGCACTGCTCCCG |
| | | CCGCTGGTGTGGGACTGCGACGGCCTGATGCGCCACGCCGCCCTGGACAGAC |
| | | ACCGGGACTGCAGGATCGACGCCGGAGGCCACGAACCGGTGTACGCCGCCGC |
| | | CTGCAACGTGGCCACCGCCGACTTCAACCGCAACGACGGCCGGCTGCTGCAC |
| | | AACACACAGGCCAGGGCGGCAGACGCCGCCGACGACCGGCCCCACAGACCCG |
| | | CCGACTGGACGGTCCACCACAAGATCTACTACTACGTGCTGGTGCCGGCGTT |
| | | CAGCAGGGGCCGGTGCTGCACCGCGGGCGTGCGGTTCGACCGGGTGTACGCC |
| | | ACACTGCAAAACATGGTGGTGCCCGAAATCGCCCCGGGCGAGGAATGCCCGA |
| | | GCGACCCCGTGACGGACCCGGCGCACCCGCTGCACCCGGCGAACCTGGTGGC |
| | | GAACACCGTGAACGCCATGTTCCACAACGGCAGAGTGGTGGTGGACGGCCCG |
| | | GCGATGCTGACCCTGCAGGTGCTGGCGCACAACATGGCCGAGCGGACCACAG |
| | | CGCTGCTGTGCAGCGCCGCGCCCGACGCGGGGGCCAACACCGCCAGCACCGC |
| | | CAACATGCGGATCTTCGACGGCGCCCTGCACGCCGGCGTCCTGCTGATGGCG |
| | | CCCCAGCACCTGGACCACACGATCCAGAACGGAGAGTACTTCTACGTGCTGC |
| | | CGGTGCACGCCCTGTTCGCCGGGGCGGACCACGTCGCGAACGCCCCCAACTT |
| | | CCCGCCCGCGCTGCGGGACCTGGCCCGCCACGTGCCGCTGGTCCCCCCGGCC |
| | | CTGGGCGCGAACTACTTCAGCAGCATCAGACAACCGGTGGTCCAGCACGCGC |
| | | GCGAGAGCGCCGCCGGAGAGAACGCCCTCACCTACGCCCTCATGGCCGGCTA |
| | | CTTCAAGATGAGCCCGGTGGCGCTGTACCACCAGCTGAAAACCGGCCTGCAC |
| | | CCGGGCTTCGGCTTCACCGTGGTGCGGTGATAACGTACGGCTGGAGCCTCGG |
| | | TGGCCTAGCTTCTTGCCCCTTGGGCCTCCCCCCAGCCCCTCCTCCCCTTCCT |
| | | GCACCCGTACCCCCGTGGTCTTTGAATAAAGTCTGAGTGGGCGGCAaaaaaa |
| | | aaaaaaaaaaaaaaaaaaaaaaagcatatgactaaaaaaaaaaaaaaaaaaa |
| | | aaaaaaaaaaaaaaaaaaaaaaaaaaaaaaaaaaaaaaaaaaaaaaaaaaaA |
| | | AAAGAAGAGCAAGCTT |
| ARV-HSV-gH (HSV- | 629 | MGPGLWVVMGVLVGVAGGHDTYWTEQIDPWELHGLGLARTYWRDTNTGRLWL |
| 2 glycoprotein H); | | PNTPDASDPQRGRLAPPGELNLTTASVPMLRWYAERFCFVLVTTAEFPRDPG |
| Protein sequence | | QLLYIPKTYLLGRPRNASLPELPEAGPTSRPPAEVTQLKGLSHNPGASALLR |
| | | SRAWVTFAAAPDREGLTFPRGDDGATERHPDGRRNAPPPGPPAGAPRHPTTN |
| | | LSIAHLHNASVTWLAARGLLRTPGRYVYLSPSASTWPVGVWTTGGLAFGCDA |
| | | ATVRARYGKGFMGTVTSMRDSPPAETTVVPADKTLARVGNPTDENAPAVLPG |
| | | PPAGPRYRVFVLGAPTPADNGSALDALRRVAGYPEESTNYAQYMSRAYAEFL |
| | | GEDPGSGTDARPSLFWRLAGLLASSGFAFVNAAHAHDAIRLSDLLGFLAHSR |
| | | VLAGLAARGAAGCAADSVFLNVSVLDPAARLRLEARLGHLVAAILEREQSLA |
| | | AHALGYQLAFVLDSPAAYGAVAPSAARLIDALYAEFLGGRALTAPMVRRALF |
| | | YATAVLRAPFLAGAPSAEQRERARRGLLITTALCTSDVAAATHADLRAALAR |
| | | TDHQKNLFWLPDHFSPCAASLRFDLAEGGFILDALAMATRSDIPADVMAQQT |
| | | RGVASALTRWAHYNALIRAFVPEATHQCSGPSHNAEPRILVPITHNASYVVT |
| | | HTPLPRGIGYKLTGVDVRRPLFITYLTATCEGHAREIEPKRLVRTENRRDLG |
| | | LVGAVFLRYTPAGEVMSVLLVDTDATQQQLACGPVAGTPNVFSSDVPSVALL |
| | | LFPNGTVIHLLAFDTLPIATIAPGFLAASALGVVMITAALAGILRVVRTCVP |
| | | FLWRRE |
| ARV-HSV-gH (HSV- | 630 | GAATTCGGCTTTAATACGACTCACTATAAGGACATTAGCTTCTGACACAACT |
| 2 glycoprotein H); | | GTGTTCACTAGCAACCTCAAACAGCCACCatgggccccggtctgtgggtggt |
| DNA sequence | | gatgggcgtactggtaggcgttgccgggggccatgacacgtactggacagag |
| | | caaatcgacccgtggttcttgcacggtctggggttggcccgcacgtactggc |
| | | gcgacacaaacaccgggaggctgtggttgcccaacacccccgacgccagcga |
| | | cccccagcgcggacgcttggcgcccccgggcgaactcaacctgacaacggca |
| | | agcgtgcccatgcttcggtggtacgccgagcgcttttgtttcgtgttggtca |
| | | ccacggccgagtttccacgggaccccgggcagctgctttacatcccaaagac |
| | | ctatctgctcggccggccacggaacgcgagcctgcccgagcttcccgaggcg |
| | | gggcccacgtccaggccccccgccgaggtgacccagctcaagggactgagcc |
| | | acaaccccggcgcctccgcgctgttgaggtcccgggcctgggtaacattcgc |
| | | ggccgcgccagaccgcgaggggcttacgttcccgcggggagacgacggggcg |
| | | accgagaggcacccggacggccgacgcaacgcaccgcccccggggccgcccg |
| | | cgggagcgccgaggcatccgacgacgaacctgagcattgcgcatctgcacaa |
| | | cgcgtccgtgacatggctggccgccaggggcctgctacggacaccgggtcgg |
| | | tacgtgtacctctccccgagcgcctcgacgtggcccgtgggagtctggacga |
| | | cgggcgggctggcgttcgggtgcgatgccgcgcttgtgcgcgcgcgatacgg |
| | | gaagggcttcatggggctcgtgatttccatgcgggacagcccaccggccgag |
| | | atcattgtggtgccagcggacaagaccctcgcacgggtcggaaatccgacag |
| | | acgaaaacgcccccgcggtgctcccagggccaccagccggccccaggtatcg |
| | | cgtcttcgtcctgggggccccgacgccagccgacaatggcagcgcgctggac |
| | | gcactacggcgggtggccggctaccccgaggagagcacgaactacgcacagt |
| | | atatgagccgggcctatgcggagtttctaggggaggacccgggaagcggcac |
| | | ggacgcgaggccgagcctgttctggcgcctcgcagggctgctcgccagcagc |
| | | gggtttgcgttcgtcaacgcggcacacgcccacgacgcgattcgcctcagcg |
| | | acctgctgggctttctagcccacagccgcgtgctggccggcctggccgcccg |
| | | gggagcagcgggctgtgcggccgacagcgtgttcctgaacgtgagcgtgttg |
| | | gacccggcggccaggctgcggcttgaggcgcgcctcggacatctggtggcag |
| | | cgatcctcgagcgagagcagagcctagcggcgcacgcgctgggctatcagct |
| | | ggcgttcgtgttggacagccccgcggcctatggcgcggtggccccgagcgcg |
| | | gcccgcctgatcgacgcactgtacgccgagtttctcggcggccgcgcgctaa |
| | | ccgccccgatggtccgccgagcgctgttttacgcaacggccgtcctccgggc |
| | | accgttcctggcaggcgcgcccagcgccgagcagcgggaacgcgcccgccgg |
| | | ggactcctcataaccacggcactgtgtacgagcgacgtagcagcggcgaccc |
| | | acgccgatctccgggccgcgctcgccaggaccgaccaccagaaaaacctctt |
| | | ctggctcccggaccacttttccccatgcgcagcatccctgcgcttcgatctc |
| | | gccgaaggagggttcatcctggacgcactgGCGatggccacccgatccgaca |
| | | tcccggcggacgtcatggcacaacagacccgcggcgtggcctccgcacttac |
| | | gcgctgggcgcactacaacgccctgatccgcgccttcgtcccggaggccacc |
| | | catcagtgtagcggcccgagccacaacgcggagccccggatcctcgtaccca |
| | | tcacccacaacgccagctatgtcgtcacacacacccccttgccacgcgggat |
| | | cggatacaagctcacgggcgttgacgtccgccgcccactgtttatcacctat |
| | | ctcaccgccacctgcgaagggcacgcgcgggagattgagccgaaacggctgg |
| | | tgcgcaccgaaaaccggcgcgaccttggcctcgtgggggccgtgtttctgcg |
| | | ctacaccccggccggggaggtcatgagcgtgctgctagtggacacggatgcc |
| | | acccaacagcagctggcccaggggccggtggcgggcaccccgaacgtgtttt |
| | | ccagcgatgtaccaagcgtggccctgttattgttccccaatggaacagtgat |
| | | tcatctgctggcctttgacacgctgcccatcgccaccatcgcccccgggttc |
| | | ctggccgcgtccgcgcttggagtcgttatgattaccgcggcactggcaggca |
| | | tcctcagggtggtccgaacgtgcgtcccatttttgtggagacgcgaatgaCG |
| | | TACGGCTGGAGCCTCGGTGGCCTAGCTTCTTGCCCCTTGGGCCTCCCCCCAG |
| | | CCCCTCCTCCCCTTCCTGCACCCGTACCCCCGTGGTCTTTGAATAAAGTCTG |
| | | AGTGGGCGGCAaaaaaaaaaaaaaaaaaaaaaaaaaaaaagcatatgactaa |
| | | aaaaaaaaaaaaaaaaaaaaaaaaaaaaaaaaaaaaaaaaaaaaaaaaaaaa |
| | | aaaaaaaaaaaaaaaaAAAAGAAGAGCAAGCTT |
| ARV-HSV-gH-HA | 631 | MGPGLWVVMGVLVGVAGGHDTYWTEQIDPWFLHGLGLARTYWRDTNTGRLWL |
| (HSV-2 glycoprotein | | PNTPDASDPQRGRLAPPGELNLTTASVPMLRWYAERFCFVLVITAEFPRDPG |
| H-HA tag), Protein | | QLLYIPKTYLLGRPRNASLPELPEAGPTSRPPAEVTQLKGLSHNPGASALLR |
| sequence. | | SRAWVTFAAAPDREGLTFPRGDDGATERHPDGRRNAPPPGPPAGAPRHPTTN |
| | | LSIAHLHNASVTWLAARGLLRTPGRYVYLSPSASTWPVGVWTTGGLAFGCDA |
| | | ALVRARYGKGFMGLVISMRDSPPAEIIVVPADKTLARVGNPIDENAPAVLPG |
| | | PPAGPRYRVFVLGAPTPADNGSALDALRRVAGYPEESTNYAQYMSRAYAEFL |
| | | GEDPGSGTDARPSLFWRLAGLLASSGFAFVNAAHAHDAIRLSDLLGFLAHSR |
| | | VLAGLAARGAAGCAADSVFLNVSVLDPAARLRLEARLGHLVAAILEREQSLA |
| | | AHALGYQLAFVLDSPAAYGAVAPSAARLIDALYAEFLGGRALTAPMVRRALF |
| | | YATAVLRAPFLAGAPSAEQRERARRGLLITTALCTSDVAAATHADLRAALAR |
| | | TDHQKNTFWTPQHFSPCAASTRFDLAEGGFIIDATAMATRSDTPADVMAQQT |
| | | RGVASALTRWAHYNALIRAFVPEATHQCSGPSHNAEPRILVPITHNASYVVT |
| | | HTPLPRGIGYKLTGVDVRRPLFITYLTATCEGHAREIEPKRLVRTENRRDLG |
| | | LVGAVFLRYTPAGEVMSVLLVDTDATQQQLAQGPVAGTPNVFSSDVPSVALL |
| | | LFPNGTVIHLLAFDTLPIATIAPGFLAASALGVVMITAALAGILRVVRTCVP |
| | | FLWRREDIYPYDVPDYA* |
| ARV-HSV-gH-HA | 632 | GAATTCGGCTTTAATACGACTCACTATAAGGACATTAGCTTCTGACACAACT |
| (HSV-2 glycoprotein | | GTGTTCACTAGCAACCTCAAACAGCCACCatgggccccggtctgtgggtggt |
| H-HA tag), DNA | | gatgggcgtactggtaggcgttgccgggggccatgacacgtactggacagag |
| sequence. | | caaatcgacccgtggttcttgcacggtctggggttggcccgcacgtactggc |
| | | gcgacacaaacaccgggaggctgtggttgcccaacacccccgacgccagcga |
| | | cccccagcgcggacgcttggcgcccccgggcgaactcaacctgacaacggca |
| | | agcgtgcccatgcttcggtggtacgccgagcgcttttgtttcgtgttggtca |
| | | ccacggccgagtttccacgggaccccgggcagctgctttacatcccaaagac |
| | | ctatctgctcggccggccacggaacgcgagcctgcccgagcttcccgaggcg |
| | | gggcccacgtccaggccccccgccgaggtgacccagctcaagggactgagcc |
| | | acaaccccggcgcctccgcgctgttgaggtcccgggcctgggtaacattcgc |
| | | ggccgcgccagaccgcgaggggcttacgttcccgcggggagacgacggggcg |
| | | accgagaggcacccggacggccgacgcaacgcaccgcccccggggccgcccg |
| | | cgggagcgccgaggcatccgacgacgaacctgagcattgcgcatctgcacaa |
| | | cgcgtccgtgacatggctggccgccaggggcctgctacggacaccgggtcgg |
| | | tacgtgtacctctccccgagcgcctcgacgtggcccgtgggagtctggacga |
| | | cgggcgggctggcgttcgggtgcgatgccgcgcttgtgcgcgcgcgatacgg |
| | | gaagggcttcatggggctcgtgatttccatgcgggacagcccaccggccgag |
| | | atcattgtggtgccagcggacaagaccctcgcacgggtcggaaatccgacag |
| | | acgaaaacgcccccgcggtgctcccagggccaccagccggccccaggtatcg |
| | | cgtcttcgtcctgggggccccgacgccagccgacaatggcagcgcgctggac |
| | | gcactacggcgggtggccggctaccccgaggagagcacgaactacgcacagt |
| | | atatgagccgggcctatgcggagtttctaggggaggacccgggaagcggcac |
| | | ggacgcgaggccgagcctgttctggcgcctcgcagggctgctcgccagcagc |
| | | gggtttgcgttcgtcaacgcggcacacgcccacgacgcgattcgcctcagcg |
| | | acctgctgggctttctagcccacagccgcgtgctggccggcctggccgcccg |
| | | gggagcagcgggctgtgcggccgacagcgtgttcctgaacgtgagcgtgttg |
| | | gacccggcggccaggctgcggcttgaggcgcgcctcggacatctggtggcag |
| | | cgatcctcgagcgagagcagagcctagcggcgcacgcgctgggctatcagct |
| | | ggcgttcgtgttggacagccccgcggcctatggcgcggtggccccgagcgcg |
| | | gcccgcctgatcgacgcactgtacgccgagtttctcggcggccgcgcgctaa |
| | | ccgccccgatggtccgccgagcgctgttttacgcaacggccgtcctccgggc |
| | | accgttcctggcaggcgcgcccagcgccgagcagcgggaacgcgcccgccgg |
| | | ggactcctcataaccacggcactgtgtacgagcgacgtagcagcggcgaccc |
| | | acgccgatctccgggccgcgctcgccaggaccgaccaccagaaaaacctctt |
| | | ctggctcccggaccacttttccccatgcgcagcatccctgcgcttcgatctc |
| | | gccgaaggagggttcatcctggacgcactgGCGatggccacccgatccgaca |
| | | tcccggcggacgtcatggcacaacagacccgcggcgtggcctccgcacttac |
| | | gcgctgggcgcactacaacgccctgatccgcgccttcgtcccggaggccacc |
| | | catcagtgtagcggcccgagccacaacgcggagccccggatcctcgtaccca |
| | | tcacccacaacgccagctatgtcgtcacacacacccccttgccacgcgggat |
| | | cggatacaagctcacgggcgttgacgtccgccgcccactgtttatcacctat |
| | | ctcaccgccacctgcgaagggcacgcgcgggagattgagccgaaacggctgg |
| | | tgcgcaccgaaaaccggcgcgaccttggcctcgtgggggccgtgtttctgcg |
| | | ctacaccccggccggggaggtcatgagcgtgctgctagtggacacggatgcc |
| | | acccaacagcagctggcccaggggccggtggcgggcaccccgaacgtgtttt |
| | | ccagcgatgtaccaagcgtggccctgttattgttccccaatggaacagtgat |
| | | tcatctgctggcctttgacacgctgcccatcgccaccatcgcccccgggttc |
| | | ctggccgcgtccgcgcttggagtcgttatgattaccgcggcactggcaggca |
| | | tcctcagggtggtccgaacgtgcgtcccatttttgtggagacgcgaaGATAT |
| | | CTACCCATACGACGTACCAGATTACGCTtgaCGTACGGCTGGAGCCTCGGTG |
| | | GCCTAGCTTCTTGCCCCTTGGGCCTCCCCCCAGCCCCTCCTCCCCTTCCTGC |
| | | ACCCGTACCCCCGTGGTCTTTGAATAAAGTCTGAGTGGGCGGCAaaaaaaaa |
| | | aaaaaaaaaaaaaaaaaaaaagcatatgactaaaaaaaaaaaaaaaaaaaaa |
| | | aaaaaaaaaaaaaaaaaaaaaaaaaaaaaaaaaaaaaaaaaaaaaaaaaAAA |
| | | AGAAGAGCAAGCTT |
| ARV-HSV-mRNA-3 | 343 | MGFEAGLMDAATPPARPPAERQGSPTPADATRYLPIAGASSVVALAPYVNKT |
| (HSV-2 UL19UD and | | VTGDCLPVLDMETGHIGAYVVLVDQTGNVADLLRAAAPAWSRRILLPEHARN |
| Multi-T-cell- | | CVRPPDYPTPPASEWNSLWMTPVGNMLFDQGTLVGALDFGAGPMRARPRGEV |
| Epitopes); Protein | | RFLHYDEAGYALYRDSSSDDDESRDTARPRRSASVAGSHGPGPARAPPPPGG |
| sequence | | PVGAGGRSHAPPARTPKMTRGAPKASATPATDPARGRRPAQASGPHETITAL |
| | | VGAARHASPFERVRCLLLRSEGRKSRRPTTTFGSGAAAPAWSRRTLLPEHHN |
| | | LFLWEDQTLLRATKNACPLLIFDRTRKFVLACPYADRLDNRLQLGMLIPGAV |
| | | KRFGGHYMESVFQMYTRIAILGILVHLRIRTREASFEEETHFTQYLIYDASP |
| | | LKGLSAMKTSNALCVRGARPFSHFPALMLEYFCRCAREESKRVDTSMSLADF |
| | | HGEEFEKLYETQYLIYDASPLKGLSLTRMAEYDRVHIYYNHRISNQALLRMA |
| | | CEVRQGNWTGAPDVSALGAQGMGFLVDAIVRVAINGLLGLADTVVACVACRR |
| | | LGPADRRFVALSGSLEVWASDSLNNEYLRLAAQREAAGVYDAVRTWGPATNF |
| | | SLLKQAGDVEENPGPRLSMFNAVGTVCHPSLMNIDAAVGGVNHDPVEAANPY |
| | | GAYVAAPAGPGADMQQRFLNAWRQRLAHGRVRWVAECQMTAEQFMQPDNANL |
| | | ALELHPAFDFFAGVADVELPGGEVPPAGPGAIQATWRVVNGNLPLALCPVAF |
| | | RDARGLELGVGRHAMAPATIAAVRGAFEDRSYPAVFYLLQAAIHGSEHVFCA |
| | | LARLVTQCITSYWNNTRCAAFVNDYSLVSYIVTYLGGDLPEECMAVYRDLVA |
| | | HVEALAQLVDDFTLPGPELGGQAQAELNHLMRDPALLPPLVWDCDGLMRHAA |
| | | LDRHRDCRIDAGGHEPVYAAACNVATADFNRNDGRLLHNTQARAADAADDRP |
| | | HRPADWTVHHKIYYYVTVPAFSRGRCCTAGVRFDRVYATLQNMVVPEIAPGE |
| | | ECPSDPVTDPAHPLHPANLVANTVNAMFHNGRVVVDGPAMLTLQVLAHNMAE |
| | | RTTALLCSAAPDAGANTASTANMRIFDGALHAGVLLMAPQHLDHTIQNGEYF |
| | | YVLPVHALFAGADHVANAPNFPPALRDLARHVPLVPPALGANYFSSIRQPVV |
| | | QHARESAAGENALTYALMAGYFKMSPVALYHQLKTGLHPGFGFTVVR |
| ARV-HSV-mRNA-3 | 344 | ATGggcTTCGAGGCCGGCCTGATGGACGCCGCGACCCCGCCGGCCCGACCGC |
| (HSV-2 UL19UD and | | CCGCGGAACGGCAAGGCAGCCCGACCCCCGCAGACGCCACCCGGTACCTGCC |
| Multi-T-cell- | | GATCGCCGGCGCCAGCAGCGTCGTGGCGCTGGCCCCCTACGTGAACAAGACC |
| Epitopes); DNA | | GTGACCGGCGACTGCCTCCCGGTCCTGGACATGGAAACCGGCCACATCGGCG |
| sequence | | CATACGTGGTGCTGGTGGACCAGACAGGCAACGTGGCCGACCTGCTGCGGGC |
| | | CGCAGCCCCCGCGTGGAGCAGGCGGACCCTACTGCCCGAGCACGCCCGCAAC |
| | | TGCGTGCGACCCCCGGACTACCCGACCCCGCCAGCGAGCGAGTGGAACAGCC |
| | | TGTGGATGACCCCGGTGGGCAACATGCTGTTCGACCAGGGCACACTGGTGGG |
| | | CGCCCTCGACTTCGGCGCCGGCCCGATGAGAGCCCGACCAAGAGGCGAGGTG |
| | | CGCTTCCTGCACTACGACGAGGCCGGGTACGCCCTGTACAGGGACAGCAGCA |
| | | GCGACGACGACGAGAGCCGGGACACCGCCCGCCCCAGACGGAGCGCCAGCGT |
| | | GGCCGGGAGCCACGGCCCGGGCCCCGCCAGAGCGCCGCCGCCGCCAGGGGGG |
| | | CCGGTGGGGGCCGGGGGACGAAGCCACGCCCCGCCGGCGAGAACACCGAAGA |
| | | TGACGCGCGGCGCCCCGAAGGCCAGCGCGACCCCCGCCACCGACCCGGCCCG |
| | | GGGACGCCGCCCGGCCCAGGCCAGCGGCCCGCACGAAACAATCACAGCCCTG |
| | | GTGGGCGCCGCGCGGCACGCCAGCCCCTTCGAGCGGGTCAGGTGCCTGCTGC |
| | | TCAGAAGCGAGGGCCGGAAAAGCCGCAGACCGCTAACGACCTTCGGCAGCGG |
| | | CGCCGCGGCCCCGGCCTGGAGCCGGCGAACCCTGCTGCCCGAGCACCACAAC |
| | | CTGTTCCTGTGGGAGGACCAGACCCTGCTGCGGGCCACCAAGAACGCCTGCC |
| | | CCCTCCTGATCTTCGACAGAACCCGCAAGTTCGTGCTGGCCTGCCCCTACGC |
| | | CGACAGGCTGGACAACCGCCTGCAACTGGGAATGCTGATCCCGGGAGCCGTG |
| | | AAGCGGTTCGGCGGCCACTACATGGAAAGCGTGTTCCAGATGTACACCCGGA |
| | | TCGCGATCCTGGGCATCCTGGTGCACCTGCGGATCAGAACCCGGGAGGCGAG |
| | | CTTCGAAGAAGAAACCCACTTCACCCAGTACCTGATCTACGACGCCAGCCCG |
| | | CTGAAGGGCCTGAGCGCCATGAAAACAAGCAACGCGCTGTGCGTAAGGGGCG |
| | | CCCGGCCATTCAGCCACTTCCCGGCGCTGATGCTGGAGTACTTCTGCAGATG |
| | | CGCCAGAGAAGAGAGCAAACGCGTGGACACAAGCATGAGCCTGGCAGACTTC |
| | | CACGGCGAGGAGTTCGAGAAGCTGTACGAGACACAGTACCTGATCTACGACG |
| | | CCAGCCCACTGAAGGGCCTGAGCCTGACCCGGATGGCAGAGTACGACCGGGT |
| | | GCACATCTACTACAACCACCGGATCAGCAACCAGGCGCTGCTGAGGATGGCC |
| | | TGCGAGGTGCGCCAGGGCAACTGGACCGGGGCGCCGGACGTGAGCGCGCTGG |
| | | GCGCGCAGGGCATGGGCTTCCTGGTGGACGCGATCGTCCGGGTGGCGATAAA |
| | | CGGCCTCCTGGGGCTGGCGGACACCGTGGTGGCCTGCGTGGCGTGCAGACGC |
| | | CTGGGCCCCGCGGACAGACGGTTCGTGGCCCTGAGCGGCAGCCTGGAGGTGT |
| | | GGGCCAGCGACAGCCTGAACAACGAGTACCTGCGCCTGGCGGCCCAGCGGGA |
| | | GGCGGCCGGCGTGTACGACGCGGTCCGGACCTGGGGCCCGGCCACCAACTTC |
| | | AGCCTGCTGAAGCAGGCGGGGGACGTGGAAGAGAACCCCGGCCCGAGGCTGA |
| | | GCATGGAAAACGCGGTGGGCACAGTCTGCCACCCCAGCCTGATGAACATCGA |
| | | CGCCGCCGTGGGCGGCGTGAACCACGACCCCGTGGAAGCCGCCAACCCGTAC |
| | | GGCGCCTACGTGGCCGCCCCAGCCGGCCCCGGCGCCGACATGCAGCAGCGGT |
| | | TCCTGAACGCCTGGCGGCAACGGCTGGCCCACGGACGGGTGAGATGGGTGGC |
| | | CGAGTGCCAGATGACCGCGGAGCAGTTCATGCAGCCGGACAACGCCAACCTG |
| | | GCCCTGGAGCTGCACCCCGCCTTCGACTTCTTCGCCGGAGTGGCCGACGTGG |
| | | AGCTGCCGGGCGGAGAGGTGCCGCCGGCCGGACCGGGCGCCATCCAGGCAAC |
| | | GTGGCGGGTAGTGAACGGCAACCTGCCCCTGGCCCTCTGCCCCGTGGCCTTC |
| | | CGGGACGCCAGAGGACTCGAGCTGGGCGTAGGCAGACACGCCATGGCCCCGG |
| | | CGACCATCGCGGCGGTGCGCGGCGCATTCGAGGACCGGAGCTACCCCGCCGT |
| | | GTTCTACCTGCTGCAGGCCGCCATCCACGGAAGCGAACACGTGTTCTGCGCC |
| | | CTCGCCCGGCTGGTCACCCAATGCATCACGAGCTACTGGAACAACACCAGAT |
| | | GCGCCGCGTTCGTGAACGACTACAGCCTCGTGAGCTACATCGTGACCTACCT |
| | | GGGCGGCGACCTGCCGGAGGAGTGCATGGCGGTCTACCGAGACCTGGTCGCC |
| | | CACGTGGAGGCCCTGGCCCAGCTGGTGGACGACTTCACCCTGCCCGGCCCGG |
| | | AGCTGGGCGGGCAGGCCCAGGCCGAGCTGAACCACCTGATGCGGGACCCGGC |
| | | ACTGCTCCCGCCGCTGGTGTGGGACTGCGACGGCCTGATGCGCCACGCCGCC |
| | | CTGGACAGACACCGGGACTGCAGGATCGACGCCGGAGGCCACGAACCGGTGT |
| | | ACGCCGCCGCCTGCAACGTGGCCACCGCCGACTTCAACCGCAACGACGGCCG |
| | | GCTGCTGCACAACACACAGGCCAGGGCGGCAGACGCCGCCGACGACCGGCCC |
| | | CACAGACCCGCCGACTGGACGGTCCACCACAAGATCTACTACTACGTGCTGG |
| | | TGCCGGCGTTCAGCAGGGGCCGGTGCTGCACCGCGGGCGTGCGGTTCGACCG |
| | | GGTGTACGCCACACTGCAAAACATGGTGGTGCCCGAAATCGCCCCGGGCGAG |
| | | GAATGCCCGAGCGACCCCGTGACGGACCCGGCGCACCCGCTGCACCCGGCGA |
| | | ACCTGGTGGCGAACACCGTGAACGCCATGTTCCACAACGGCAGAGTGGTGGT |
| | | GGACGGCCCGGCGATGCTGACCCTGCAGGTGCTGGCGCACAACATGGCCGAG |
| | | CGGACCACAGCGCTGCTGTGCAGCGCCGCGCCCGACGCGGGGGCCAACACCG |
| | | CCAGCACCGCCAACATGCGGATCTTCGACGGCGCCCTGCACGCCGGCGTCCT |
| | | GCTGATGGCGCCCCAGCACCTGGACCACACGATCCAGAACGGAGAGTACTTC |
| | | TACGTGCTGCCGGTGCACGCCCTGTTCGCCGGGGCGGACCACGTCGCGAACG |
| | | CCCCCAACTTCCCGCCCGCGCTGCGGGACCTGGCCCGCCACGTGCCGCTGGT |
| | | CCCCCCGGCCCTGGGCGCGAACTACTTCAGCAGCATCAGACAACCGGTGGTC |
| | | CAGCACGCGCGCGAGAGCGCCGCCGGAGAGAACGCCCTCACCTACGCCCTCA |
| | | TGGCCGGCTACTTCAAGATGAGCCCGGTGGCGCTGTACCACCAGCTGAAAAC |
| | | CGGCCTGCACCCGGGCTTCGGCTTCACCGTGGTGCGG |
| ARV-HSV-mRNA-4 | 345 | MRMQLLLLIALSLALVTNSRTSWKRVTSGEDVVLLPAPAGPEERTRAHKLLW |
| (HSV-2 glycoprotein | | AAEPLDACGPLRPSWVALWPPRRVLETVVDAACMRAPEPLAIAYSPPFPAGD |
| E and glycoprotein | | EGLYSELAWRDRVAVVNESLVEYGALETDSGLYTLSVVGLSDEARQVASVVL |
| C); Protein sequence | | VVEPAPVPTPTPDDYDEEDDAGVSERTPVSVPPPTPPRRPPVAPPTHPRVIP |
| | | EVSHVRGVTVHMETPEAILFAPGETFGTNVSIHAIAHDDGPYAMDVVWMRFD |
| | | VPSSCAEMRIYEACLYHPQLPECLSPADAPCAVSSWAYRLAVRSYAGCSRTT |
| | | PPPRCFAEARMEPVPGLAWLASTVNLEFQHASPQHAGLYLCVVYVDDHIHAW |
| | | GHMTISTAAQYRNAVVEQHLPQRQPEPVEPTRPHVRA*ATNFSLLKQAGDVE |
| | | ENPGPMRMQLLLLIALSLALVINSASPGRTITVGPRGNASNAAPSASPRNAS |
| | | APRTTPTPPQPRKATKSKASTAKPAPPPKTGPPKTSSEPVRCNRHDPLARYG |
| | | SRVQIRCRFPNSTRTEFRLQIWRYATATDAEIGTAPSLEEVMVNVSAPPGGQ |
| | | LVYDSAPNRTDPHVIWAEGAGPGASPRLYSVVGPLGRQRLIIEELTLETQGM |
| | | YYWVWGRTDRPSAYGTWVRVRVFRPPSLTIHPHAVLEGQPFKATCTAATYYP |
| | | GNRAEFVWFEDGRRVFDPAQIHTQTQENPDGFSTVSTVISAAVGGQGPPRTF |
| | | TCQLTWHRDSVSFSRRNASGTASVLPRPTITMEFTGDHAVCTAGCVPEGVTF |
| | | AWFLGDDSSPAEKVAVASQTSCGRPGTATIRSTLPVSYEQTEYICRLAGYPD |
| | | GIPVLEHH |
| ARV-HSV-mRNA-4 | 346 | ATGCGCATGCAGCTGCTGCTGCTGATCGCCCTGTCCCTGGCCCTGGTGACCA |
| (HSV-2 glycoprotein | | ACTCCCGCACCTCCTGGAAGCGCGTGACCTCCGGCGAGGACGTGGTGCTGCT |
| E and glycoprotein | | GCCCGCCCCCGCCGGCCCCGAGGAGCGCACCCGCGCCCACAAGCTGCTGTGG |
| C); DNA sequence | | GCCGCCGAGCCCCTGGACGCCTGCGGCCCCCTGCGCCCCTCCTGGGTGGCCC |
| | | TGTGGCCCCCCCGCCGCGTGCTGGAGACCGTGGTGGACGCCGCCTGCATGCG |
| | | CGCCCCCGAGCCCCTGGCCATCGCCTACTCCCCCCCCTTCCCCGCCGGCGAC |
| | | GAGGGCCTGTACTCCGAGCTGGCCTGGCGCGACCGCGTGGCCGTGGTGAACG |
| | | AGTCCCTGGTGATCTACGGCGCCCTGGAGACCGACTCCGGCCTGTACACCCT |
| | | GTCCGTGGTGGGCCTGTCCGACGAGGCCCGCCAGGTGGCCTCCGTGGTGCTG |
| | | GTGGTGGAGCCCGCCCCCGTGCCCACCCCCACCCCCGACGACTACGACGAGG |
| | | AGGACGACGCCGGCGTGTCCGAGCGCACCCCCGTGTCCGTGCCCCCCCCCAC |
| | | CCCCCCCCGCCGCCCCCCCGTGGCCCCCCCCACCCACCCCCGCGTGATCCCC |
| | | GAGGTGTCCCACGTGCGCGGCGTGACCGTGCACATGGAGACCCCCGAGGCCA |
| | | TCCTGTTCGCCCCCGGCGAGACCTTCGGCACCAACGTGTCCATCCACGCCAT |
| | | CGCCCACGACGACGGCCCCTACGCCATGGACGTGGTGTGGATGCGCTTCGAC |
| | | GTGCCCTCCTCCTGCGCCGAGATGCGCATCTACGAGGCCTGCCTGTACCACC |
| | | CCCAGCTGCCCGAGTGCCTGTCCCCCGCCGACGCCCCCTGCGCCGTGTCCTC |
| | | CTGGGCCTACCGCCTGGCCGTGCGCTCCTACGCCGGCTGCTCCCGCACCACC |
| | | CCCCCCCCCCGCTGCTTCGCCGAGGCCCGCATGGAGCCCGTGCCCGGCCTGG |
| | | CCTGGCTGGCCTCCACCGTGAACCTGGAGTTCCAGCACGCCTCCCCCCAGCA |
| | | CGCCGGCCTGTACCTGTGCGTGGTGTACGTGGACGACCACATCCACGCCTGG |
| | | GGCCACATGACCATCTCCACCGCCGCCCAGTACCGCAACGCCGTGGTGGAGC |
| | | AGCACCTGCCCCAGCGCCAGCCCGAGCCCGTGGAGCCCACCCGCCCCCACGT |
| | | GCGCGCCTAAGCCACGAACTTCTCACTATTAAAGCAAGCAGGAGACGTGGAA |
| | | GAAAACCCCGGTCCAATGCGCATGCAGCTGCTGCTGCTGATCGCCCTGTCCC |
| | | TGGCCCTGGTGACCAACTCCGCCTCCCCCGGCCGCACCATCACCGTGGGCCC |
| | | CCGCGGCAACGCCTCCAACGCCGCCCCCTCCGCCTCCCCCCGCAACGCCTCC |
| | | GCCCCCCGCACCACCCCCACCCCCCCCCAGCCCCGCAAGGCCACCAAGTCCA |
| | | AGGCCTCCACCGCCAAGCCCGCCCCCCCCCCCAAGACCGGCCCCCCCAAGAC |
| | | CTCCTCCGAGCCCGTGCGCTGCAACCGCCACGACCCCCTGGCCCGCTACGGC |
| | | TCCCGCGTGCAGATCCGCTGCCGCTTCCCCAACTCCACCCGCACCGAGTTCC |
| | | GCCTGCAGATCTGGCGCTACGCCACCGCCACCGACGCCGAGATCGGCACCGC |
| | | CCCCTCCCTGGAGGAGGTGATGGTGAACGTGTCCGCCCCCCCCGGCGGCCAG |
| | | CTGGTGTACGACTCCGCCCCCAACCGCACCGACCCCCACGTGATCTGGGCCG |
| | | AGGGCGCCGGCCCCGGCGCCTCCCCCCGCCTGTACTCCGTGGTGGGCCCCCT |
| | | GGGCCGCCAGCGCCTGATCATCGAGGAGCTGACCCTGGAGACCCAGGGCATG |
| | | TACTACTGGGTGTGGGGCCGCACCGACCGCCCCTCCGCCTACGGCACCTGGG |
| | | TGCGCGTGCGCGTGTTCCGCCCCCCCTCCCTGACCATCCACCCCCACGCCGT |
| | | GCTGGAGGGCCAGCCCTTCAAGGCCACCTGCACCGCCGCCACCTACTACCCC |
| | | GGCAACCGCGCCGAGTTCGTGTGGTTCGAGGACGGCCGCCGCGTGTTCGACC |
| | | CCGCCCAGATCCACACCCAGACCCAGGAGAACCCCGACGGCTTCTCCACCGT |
| | | GTCCACCGTGACCTCCGCCGCCGTGGGCGGCCAGGGCCCCCCCCGCACCTTC |
| | | ACCTGCCAGCTGACCTGGCACCGCGACTCCGTGTCCTTCTCCCGCCGCAACG |
| | | CCTCCGGCACCGCCTCCGTGCTGCCCCGCCCCACCATCACCATGGAGTTCAC |
| | | CGGCGACCACGCCGTGTGCACCGCCGGCTGCGTGCCCGAGGGCGTGACCTTC |
| | | GCCTGGTTCCTGGGCGACGACTCCTCCCCCGCCGAGAAGGTGGCCGTGGCCT |
| | | CCCAGACCTCCTGCGGCCGCCCCGGCACCGCCACCATCCGCTCCACCCTGCC |
| | | CGTGTCCTACGAGCAGACCGAGTACATCTGCCGCCTGGCCGGCTACCCCGAC |
| | | GGCATCCCCGTGCTGGAGCACCAC |
| ARV-MPX-mRNA-1 | 347 | MGAAASIQTTVNTLSERISSKLEQEANASAQTKCDIEIGNFYIRQNHGCNIT |
| (MPX viral proteins | | VKNMCSADADAQLDAVLSAATETYSGLTPEQKAYVPAMFTAALNIQTSVNTV |
| of M1R, A35R and | | VRDFENYVKQTCNSSAVVDNKLKIQNVIIDECYGAPGSPTNLEFINTGSSKG |
| B6R); Protein | | NCAIKALMQLTTKATTQIAPRQVAGTGVQFYMIVIGVIILAALFMYYAKRML |
| sequence | | FTSTNDKIKLILANKENVHIWTTYMDTFFRTSPMIIATTDIQNATNFSLKQA |
| | | GDVEENPGPMMTPENDEEQTSVFSATVYGDKIQGKNKRKRVIGLCIRISMVI |
| | | SLLSMITMSAFLIVRQNQCMSANEAAITDSAVAVAAASSTHRKVASSTTQYD |
| | | HKESCNGLYYQGSCYILHADYKSFEDAKANCAAESSTLFNKSDVLTTWLIDY |
| | | VEDTWGSDGNPITKTTSDYQDSDVSQEVRKYFCTATNFSLLKQAGDVEENPG |
| | | PMKTISVVTLLCVLPAVVYSTCTVPTMNNAKLISTETSFNDKQKVTFTCDSG |
| | | YHSLDPNAVCETDKWKYENPCKKMCTVSDYVSELYDKPLYEVNSTMTLSCNG |
| | | ETKYFRCEEKNGNTSWNDTVTCPNAECQPLQLEHGSCQPVKEKYSFGEYMTI |
| | | NCDVGYEVIGVSYISCTANSWNVIPSCQQKCDIPSLSNGLISGSTFSIGGVI |
| | | HLSCKSGFTLTGSPSSTCIDGKWNPILPTCVRSNEEFDPVDDGPDDETDLSK |
| | | LSKDVVQYEQEIESLEATYHITIMALTIMGVIFLISIIVLVCSCDKNNDQYK |
| | | FHKLLP |
| ARV-MPX-mRNA-1 | 348 | TAATACGACTCACTATAGGGagAGAGATAAACATAAACATAAACGACAAGAA |
| (MPX viral proteins | | ACACATACAAAAGAAACAGAACAGAAAACAGCCACCATGGGAGCCGCTGCTT |
| of M1R, A35R and | | CCATTCAAACAACCGTGAACACCCTGTCTGAAAGAATCAGCAGCAAGCTGGA |
| B6R); DNA sequence | | ACAAGAGGCCAATGCCAGCGCCCAGACCAAGTGCGACATCGAAATCGGCAAT |
| | | TTCTACATCAGACAGAATCACGGTTGTAATATCACCGTGAAAAACATGTGCA |
| | | GCGCCGACGCTGATGCCCAGCTCGACGCCGTCCTGTCTGCTGCTACAGAGAC |
| | | ATATTCTGGCCTGACTCCCGAACAGAAGGCCTACGTCCCCGCCATGTTCACC |
| | | GCCGCCCTGAACATCCAGACASCTGTGAACACCGTTGTGCGAGATTTCGAGA |
| | | ACTACGTGAAGCAGACATGCAATAGCAGCGCCGTGGTCGACAACAAGCTGAA |
| | | GATCCAGAACGTGATCATCGACGAGTGCTACGGCGCCCCTGGCAGCCCCACC |
| | | AACCTGGAGTTCATCAACACCGGCAGCAGCAAGGGCAACTGCGCCATCAAAG |
| | | CCCTCATGCAGCTGACCACCAAGGCCACAACCCAAATCGCCCCTAGACAAGT |
| | | GGCCGGCACCGGCGTTCAATTTTACATGATCGTGATTGGCGTGATCATCCTG |
| | | GCTGCGCTGTTCATGTACTACGCCAAACGGATGCTGTTTACCAGCACCAATG |
| | | ACAAGATCAAGCTGATCCTGGCCAACAAGGAAAACGTGCACTGGACCACATA |
| | | CATGGACACCTTCTTCAGAACCAGCCCTATGATCATTGCCACCACCGATATC |
| | | CAGAACGCCACAAACTTCAGCCTGCTGAAGCAGGCCGGAGATGTCGAGGAAA |
| | | ACCCAGGCCCCATGATGACACCTGAAAATGATGAGGAACAGACCAGCGTTTT |
| | | CAGCGCAACAGTGTACGGCGATAAGATCCAGGGCAAGAACAAGCGGAAGAGA |
| | | GTGATCGGCCTGTGCATCAGAATCAGCATGGTGATCAGCCTGCTGAGCATGA |
| | | TCACCATGAGCGCCTTCCTGASCGTGCGGCAGAACCAGTGCATGAGCGCAAA |
| | | TGAGGCCGCTATCACCGATAGCGCCGTGGCCGTGGCCGCTGCTAGCTCTACC |
| | | CACAGAAAGGTGGCCAGCAGCACAACCCAGTACGACCACAAGGAGTCTTGCA |
| | | ACGGCCTGTACTACCAGGGCTCTTGTTACATCCTGCACAGCGACTATAAGTC |
| | | ATTCGAGGACGCCAAGGCTAACTGCGCCGCCGAGAGCAGCACCCTGCCTAAC |
| | | AAGTCCGACGTGCTGACCACTTGGCTGATCGACTACGTGGAGGACACATGGG |
| | | GCTCCGATGGCAATCCTATCACCAAAACCACATCCGACTATCAGGACAGCGA |
| | | CGTGAGCCAGGAGGTGCGGAAGTACTTCTGCACCGCCACAAACTTCAGCCTG |
| | | CTGAAACAGGCCGGGGACGTGGAAGAGAACCCAGGACCTATGAAGACCATCT |
| | | CTGTGGTGACCCTTCTTTGCGTGCTGCCTGCCGTGGTCTACAGCACCTGCAC |
| | | CGTGCCCACCATGAACAACGCCAAGCTCACATCCACCGAAACAAGCTTCAAC |
| | | GACAAGCAGAAAGTGACCTTCACCTGCGACAGCGGATATCATTCTCTGGACC |
| | | CCAACGCAGTGTGCGAGACAGACAAGTGGAAATACGAGAATCCTTGTAAAAA |
| | | GATGTGTACAGTGTCCGATTACGTGTCCGAGCTGTACGATAAGCCTCTGTAC |
| | | GAGGTGAATTCTACCATGACCCTGAGCTGTAATGGAGAGACGAAGTATTTTA |
| | | GATGCGAGGAAAAGAACGGCAACACAAGCTGGAACGATACAGTCACCTGTCC |
| | | TAACGCTGAATGCCAGCCCCTGCAGCTGGAGCACGGCAGTTGCCAGCCTGTG |
| | | AAAGAGAAGTACAGCTTTGGCGAGTACATGACCATCAACTGCGACGTGGGCT |
| | | ACGAGGTGATTGGCGTCAGCTACATCTCTTGTACCGCCAACAGCTGGAATGT |
| | | GATCCCTAGCTGTCAGCAGAAGTGCGACATCCCCAGCCTGAGCAACGGACTG |
| | | ATCTCCGGCTCTACCTTTAGCATCGGCGGAGTGATCCACCTGAGCTGCAAAA |
| | | GCGGCTTCACCCTGACCGGCTCCCCTTCTAGTACATGCATCGATGGAAAGTG |
| | | GAACCCCATTCTGCCAACCTGTGTGAGGTCCAACGAGGAATTCGACCCTGTG |
| | | GACGACGGCCCTGATGATGAAACCGACCTGTCAAAGCTGTCAAAGGACGTGG |
| | | TGCAGTACGAGCAGGAGATCGAGAGCCTGGAAGCCACATACCACATCATTAT |
| | | CATGGCCCTGACAATCATGGGCGTGATCTTCCTGATCTCTATCATCGTGCTG |
| | | GTGTGCAGCTGTGATAAGAACAACGACCAGTACAAGTTCCACAAGCTGCTGC |
| | | CTTGACGTACGGCTGGAGCCTCGGTGGCCTAGCTTCTTGCCCCTTGGGCCTC |
| | | CCCCCAGCCCCTCCTCCCCTTCCTGCACCCGTACCCCCGTGGTCTTTGAATA |
| | | AAGTCTGAGTGGGCGGCAaaaaaaaaaaaaaaaaaaaaaaaaaaaaagcata |
| | | tgactaaaaaaaaaaaaaaaaaaaaaaaaaaaaaaaaaaaaaaaaaaaaaaa |
| | | aaaaaaaaaaaaaaaaaaaaaaaAAAAGAAGAGCAAGCTT |
| ARV-MPX-mRNA-2 | 349 | MMKMKMMVRIYFVSLSALLFHSYAIDIENEITEFFNKMRDTLPAKDSKWLNP |
| (MPX viral proteins | | VCMFGGTMNDMAALGEPFSAKCPPIEDSLLSHRYKDYVVKWERLEKNRRRQV |
| of IFNbp (B16R), | | SNKRVKHGDLWIANYTSKFSNRRYLCTVTTKNGDCVQGVVRSHVWKPSSCIP |
| F3L and Multiple T | | KTYELGTYDKYGIDLYCGILYAKHYNNITWYKDNKEINIDDFKYSQAGKELI |
| cell Epitopes (MTE); | | IHNPELEDSGRYDCYVHYDDVRIKNDIVVSRCKILTVIPSQDHRFKLILDPK |
| Protein sequence | | INVTIGEPANITCSAVSTSLFVDDVLIEWENPSGWIIGLDFGVYSILTSRGG |
| | | ITEATLYFENVTEEYIGNTYTCRGHNYYFDKILTTTVVLEATNFSLLKQAGD |
| | | VEENPGPMEKREVNKATYDLQRSTMVYSSDDTPPRWSTTMDADTRPTDSDAD |
| | | AIIDDVSREKSMREDNKSFDDVIPVKKIIYWKGVNPVTVINEYCQITRRDWS |
| | | FRIESVGPSNSPTFYACVDIDGRVFDKADGKSKRDAKNNAAKLAVDKALSYV |
| | | IIRFATNFSLLKQAGDVEENPGPSLTILDDNLYKVYNGRRGKIDYYIPYVED |
| | | FVRHCLTEYILWVSHRYMSNLFDIPLLTVYWPCVDAVKDVTITKKNNIDHIV |
| | | WINNSWKFNSERKKTYNDHIVNLLFCLSTEERHIFLDYKKYYFTFLVIAINA |
| | | MFNSYMSNLFDIPLLTVYWPVRHCLTEYILWVSHRYDVSLSAYIIRVTTAED |
| | | NYPSNKNYEITLR |
| ARV-MPX-mRNA-2 | 350 | TAATACGACTCACTATAGGGagAGAGATAAACATAAACATAAACGACAAGAA |
| (Monkeypox (MPX) | | ACACATACAAAAGAAACAGAACAGAAAACAGCCACCATGATGAAGATGAAGA |
| viral proteins of | | TGATGGTCAGAATCTACTTCGTGTCCCTGAGCCTGTTGCTGTTTCACAGCTA |
| IFNbp (B16R), F3L | | CGCTATCGACATCGAGAACGAGATCACCGAGTTCTTCAACAAGATGCGCGAC |
| and Multiple T cell | | ACTCTGCCTGCCAAGGACAGCAAGTGGCTGAACCCTGTGTGCATGTTCGGCG |
| Epitopes (MTE); | | GAACCATGAACGACATGGCCGCTCTGGGAGAACCCTTCAGCGCCAAGTGCCC |
| DNA sequence | | TCCTATCGAGGATTCTCTCCTGAGCCACAGATACAAGGACTACGTGGTCAAG |
| | | TGGGAAAGACTGGAAAAAAACCGGAGAAGGCAGGTGTCCAACAAGCGGGTGA |
| | | AACACGGAGATCTGTGGATCGCCAATTACACCTCCAAGTTCAGCAACAGACG |
| | | GTACCTGTGCACCGTTACAACAAAGAACGGCGATTGCGTGCAAGGCGTGGTG |
| | | CGGTCCCACGTGTGGAAACCTAGCAGCTGCATCCCCAAGACCTACGAGCTGG |
| | | GCACCTATGATAAGTACGGCATAGATCTGTATTGCGGCATCCTGTACGCTAA |
| | | ACACTACAACAACATCACCTGGTACAAGGACAACAAGGAAATCAATATCGAT |
| | | GACTTCAAGTACAGCCAGGCTGGCAAAGAGCTTATTATCCACAACCCTGAGC |
| | | TGGAAGATAGCGGAAGATACGACTGCTACGTGCACTACGACGACGTGCGGAT |
| | | CAAGAATGACATTGTGGTGTCTAGATGCAAGATCCTGACCGTGATCCCTTCT |
| | | CAGGACCACCGGTTCAAACTGATCCTCGATCCTAAGATCAATGTGACCATTG |
| | | GCGAGCCCGCCAACATCACCTGTAGCGCCGTGTCCACCAGCCTGTTCGTGGA |
| | | TGATGTTCTGATCGAGTGGGAGAATCCTAGTGGATGGATCATCGGCCTGGAC |
| | | TTCGGCGTTTACAGCATCCTGACAAGCCGGGGAGGCATCACCGAGGCCACCC |
| | | TGTACTTCGAGAACGTGACCGAGGAATACATCGGGAACACCTACACCTGCAG |
| | | AGGCCACAATTACTACTTCGACAAGACCCTGACCACAACAGTGGTGCTGGAA |
| | | GCCACAAACTTCAGCCTGCTGAAGCAGGCCGGCGACGTTGAGGAAAATCCTG |
| | | CCCCTATGGAAAAGAGAGAGGTGAACAAGGCCCTGTACGACCTGCAGCGGTC |
| | | TACAATGGTGTACAGCAGCGACGATACCCCTCCAAGATGGTCCACCACCATG |
| | | GACGCTGATACAAGACCTACCGACTCCGACGCCGACGCTATCATCGACGACG |
| | | TGAGCAGAGAAAAGTCTATGAGAGAGGATAACAAAAGCTTCGACGACGTGAT |
| | | TCCAGTCAAAAAGATCATCTACTGGAAGGGCGTGAATCCAGTGACCGTGATT |
| | | AACGAGTACTGTCAGATCACAAGAAGAGACTGGAGCTTTAGAATCGAGAGCG |
| | | TGGGCCCTAGCAACTCTCCTACATTCTACGCTTGTGTGGACATCGACGGCAG |
| | | AGTCTTTGATAAGGCCGACGGCAAGAGCAAGCGGGACGCCAAAAACAACGCC |
| | | GCCAAGCTGGCCGTGGACAAGCTGCTGAGCTACGTGATCATTAGATTCGCCA |
| | | CCAACTTCAGCCTGCTGAAACAGGCCGGCGATGTTGAAGAGAACCCCGGCCC |
| | | CAGCCTGACCATCCTGGACGACAACCTGTACAAGGTCTACAACGGCCGGCGG |
| | | GGCAAGATCGACTACTACATCCCCTACGTGGAAGATTTCGTGCGCCACTGTC |
| | | TGACCGAGTACATCCTGTGGGTCTCCCACCGGTACATGAGCAACCTGTTCGA |
| | | CATTCCTCTGCTGACTGTGTACTGGCCTTGTGTGGACGCCGTGAAGGACGTG |
| | | ACCATCACAAAAAAGAACAATATCGATCACATCGTGTGGATCAACAACTCTT |
| | | GGAAGTTTAACAGTGAAAGAAAGAAGACCTACAACGACCACATCGTGAACCT |
| | | GCTGTTCTGCCTGAGCACAGAAGAGAGACACATCTTCCTGGACTATAAGAAG |
| | | TACTACTTCACCTTTCTGGTGATCGCCATCAACGCCATGTTCAACAGCTACA |
| | | TGTCTAACCTGTTTGACATCCCCCTGCTGACAGTGTATTGGCCCGTGAGGCA |
| | | TTGCCTGACGGAATACATCCTGTGGGTGTCTCATAGATACGACGTGAGCCTG |
| | | AGCGCATACATCATCCGGGTGACAACAGCCGAGGACAATTATCCTTCTAATA |
| | | AAAACTATGAGATCACCCTCAGATGACGTACGGCTGGAGCCTCGGTGGCCTA |
| | | GCTTCTTGCCCCTTGGGCCTCCCCCCAGCCCCTCCTCCCCTTCCTGCACCCG |
| | | TACCCCCGTGGTCTTTGAATAAAGTCTGAGTGGGCGGCAaaaaaaaaaaaaa |
| | | aaaaaaaaaaaaaaaagcatatgactaaaaaaaaaaaaaaaaaaaaaaaaaa |
| | | aaaaaaaaaaaaaaaaaaaaaaaaaaaaaaaaaaaaaaaaaaaaAAAAGAAG |
| | | AGCAAGCTT |

TABLE 2
list of T cell epitopes in the constructs
DNA and Protein Sequences in Constructs

| | SEQ | |
|---|---|---|
| | ID | List of T cell epitopes |
| mRNA | NO: | in the mRNA |
| ARV- | 351 | KSYELQTPF |
| COV- | 352 | YELQTPFEI |
| MTE | 353 | NYMPYFFTL |
| (SARS- | 354 | MPYFFTLLL |
| COV-2 | 355 | FLLNKEMYL |
| Multi-T- | 356 | SAFAMMFVK |
| cell- | 357 | MTNRQFHQK |
| Epitopes); | 358 | RQFHQKLLK |
| protein | 359 | SMMGFKMNY |
| Sequence | 360 | TYRRLISMMGFKMNY (MHC 2) |
| | 361 | LPVNVAFEL |
| | 362 | HSYFTSDYY |
| | 363 | LWLLWPVTL |
| | 364 | ASFRLFARTRSMWSF |
| | 365 | SFRLFARTR |
| | 366 | SELVIGAVI |
| | 367 | LPKEITVAT |
| | 368 | SYFIASFRLFARTRS (MHC 2) |
| | 369 | ASFRLFARTRSMWSF (MHC 2) |
| | 370 | NTASWFTAL |
| | 371 | FTALTQHGK |
| | 372 | MARKTLNSL |
| | 373 | LSPRWYFYY |
| | 374 | LSPRWYFYYLGTGPE (MHC 2) |
| | 375 | AQFAPSASAF |
| | 376 | LLNKHIDAYK |
| | 378 | NPLLYDANYFLCWHTNCYDYCIPYNSVTSSI |
| | 379 | RLFARTRSMWSFNPETNILLNVPLHGTILTR |
| | | PLLESELVIGAVILRGHLRIAGHHL |
| | 380 | NSSPDDQIGYY |
| | 381 | RRGPEQTQGNFGDQELIRQGTDYKHWPQIAQ |
| | | FAPSASAFFGM |
| | 383 | SALNHTKKW |
| | 384 | QVNGLTSIKW |
| | 385 | SIKWADNNCY |
| | 386 | YLATALLTL |
| | 387 | TTLPVNVAF |
| | 388 | GFLFLTWICLLQFAYANRNRFLYI |
| | 389 | RNRFLYIIKLIFLWLLWPVTLACFV |
| | 390 | LKKLLEQWNLVIGFLFLTW |
| | 391 | LWPVTLACFVLAAVYRINWI |
| | 392 | LVGLMWLSYFIASFRLFARTRSMWSFNP |
| | 393 | MWSFNPETNILLNVPLHGTIL |
| | 394 | IGAVILRGHLRIAGHHLGRCD |
| | 395 | PKEITVATSRTLSYYKL |
| | 396 | TLSYYKLGASQRVAGDSG |
| | 398 | TTDPSFLGRY |
| | 399 | IEYPIIGDEL |
| | 400 | VYFLQSINF |
| | 401 | NRFLYIIKL |
| | 402 | SELVIGAVIL |
| | 403 | RWYFYYLGTGPEAGL (MHC 2) |
| | 404 | MEVTPSGTWL |
| | 405 | ASWFTALTQHGKED (MHC 2) |
| | 406 | IGYYRRATRRIRGGD (MHC 2) |
| | 407 | GTWLTYTGAIKLDDK (MHC 2) |
| | 409 | RTAPHGHVM |
| | 410 | KSYELQTPF |
| | 411 | KLAKKFDTF |
| | 412 | FLGRYMSAL |
| | 413 | CTNYMPYFF |
| | 414 | YMPYFFTLL |
| | 415 | MPYFFTLLL |
| | 416 | FLLNKEMYL |
| | 417 | TQYNRYLAL |
| | 418 | AMSAFAMMF |
| | 419 | RQFHQKLLK |
| | 420 | SMMGFKMNY |
| | 421 | KMNYQVNGY |
| | 422 | YVMHANYIF |
| | 423 | VMHANYIFW |
| | 424 | IQLSSYSLF |
| | 425 | APFLYLYAL |
| | 426 | YANRNRFLY |
| | 427 | YFIASFRLF |
| | 428 | RLFARTRSM |
| | 429 | ATSRTLSYY |
| | 430 | ITLATCELY |
| | 431 | FPRGQGVPI |
| | 432 | LSPRWYFYY |
| | 433 | SPRWYFYYL |
| | 434 | QPYVFIKRSDARTAP |
| | 435 | QIDGYVMHANYIFWR |
| | 436 | YFLCWHTNCYDYCIPY |
| | 437 | KDCVVLHSYFTSDYYQLY |
| | 438 | YFTSDYYQLYSTQLSTDTGV |
| | 439 | GVEHVTFFIYNKIVDEPEEH |
| | 440 | LRIAGHHLGRCDIKDLPK |
| | 441 | GAVILRGHLRIAGHHLGR |
| | 442 | TSRTLSYYKLGASQRVA |
| | 443 | IGNYKLNTDHSSSSDNIA |
| | 444 | PKEITVATSRTLSYYKL |
| | 445 | LITLATCELYHYQECVR |
| | 446 | DQIGYYRRATRRIR |
| | 447 | LSPRWYFYYLGTGPEAGL |
| | 448 | AFFGMSRIGMEVTPSGTW |
| | 449 | GMEVTPSGTWLTYTGAIK |
| | 450 | LLNKHIDAYKTFPPTEPK |
| | 451 | PNFKDQVILLNKHIDAYK (MHC 2) |

TABLE 3
list of T cell epitopes in the constructs
DNA and Protein Sequences in Constructs

| | SEQ | |
|---|---|---|
| | ID | List of T cell epitopes |
| mRNA | NO: | in the mRNA |
| ARV-HSV-mRNA- | 649 | VYADRLDNRLQLGML |
| 3 (HSV-2 UL19UD | 452 | QASGPHETITALVGA |
| and Multi-T-cell- | 453 | ARHASPFERVRCLLLRS |
| Epitopes); Protein | 454 | EGRKSRRPLTTFGSG |
| sequence | 455 | AAAPAWSRRTLLPEH |
| | 456 | HNLFLWEDQTLLRAT |
| | 457 | RGAFEDRSYPAVFYLLQAA |
| | 458 | KNACPLLIFDRTRKFVLACP |
| | 459 | YADRLDNRLQLGMLIPGAV |
| | 460 | KRFGGHYMESVFQMYTRIA |
| | 461 | ILGILVHLRIRTREASFEE |
| | 462 | ETHFTQYLIYDASPLKGLS |
| | 463 | AMKTSNALCVRGARPFSHF |
| | 464 | PALMLEYFCRCAREESKRV |
| | 465 | DTSMSLADFHGEEFEKLYE |
| | 466 | NAWRQRLAHGRVRWVAECQ |
| | 467 | TQYLIYDASPLKGLSL |
| | 468 | TRMAEYDRVHIYYNHR |
| | 469 | ISNQALLRMACEVRQ |
| | 470 | GNWTGAPDVSALGAQG |
| ARV-HSV-mRNA- | 471 | ITQFILEHRARASCK |
| 2 (HSV-2 | 472 | LPRFIPENQRTVALY |
| glycoprotein D and | 473 | YTSTLLPPELSDTTN |
| glycoprotein B); | 474 | DSGLLDYTEVQRRNQ |
| Protein sequence | 475 | AALLVVAVGLRV |
| | 476 | AALLVVAVGLRVVCAKYALA |
| | 477 | AAPANPGLIIGA |
| | 478 | ALLVVAVGLRVV |
| | 479 | ANPGLIIGALAG |
| | 480 | APAAPANPGLII |
| | 481 | APANPGLIIGAL |
| | 482 | AVGLRVVCAKYA |
| | 483 | AYQQGVTVDSIG |
| | 484 | CRSVLLHAPSEAPQIVRGAS |
| | 485 | DEARKHTYNLTIAWYRMGDN |
| | 486 | DPEDSALLEDPA |
| | 487 | DPSLKMADPNRFRGKNLPVL |
| | 488 | EAPQIVRGASDEARKHTYNL |
| | 489 | EDPEDSALLEDP |
| | 490 | EDSALLEDPAGT |
| | 491 | ELSDTTNATQPELVPEDPED |
| | 492 | ELVPEDPEDSAL |
| | 493 | ENQRTVALYSLKIAGWHGPK |
| | 494 | GLRVVCAKYALA |
| | 495 | GVTVDSIGMLPR |
| | 496 | HAPAAPANPGLI |
| | 497 | HAPAAPANPGLIIGALAGST |
| | 498 | KAYQQGVTVDSI |
| | 499 | KAYQQGVTVDSIGMLPRFTP |
| | 500 | LAALVIGGIAFWVRRRRSVA |
| | 501 | LIIGALAGSTLAALVIGGIA |
| | 502 | LLVVAVGLRVVC |
| | 503 | LVPEDPEDSALL |
| | 504 | LVVAVGLRVVCA |
| | 505 | MGRLTSGVGTAALLVVAVGL |
| | 506 | NPGLIIGALAGS |
| | 507 | PAAPANPGLIIG |
| | 508 | PANPGLIIGALA |
| | 509 | PEDPEDSALLED |
| | 510 | PEDSALLEDPAG |
| | 511 | PELVPEDPEDSA |
| | 512 | PELVPEDPEDSALLEDPAGT |
| | 513 | PGLIIGALAGST |
| | 514 | QGVTVDSIGMLP |
| | 515 | QQGVTVDSIGML |
| | 516 | RASCKYALPLRIPPAACLTS |
| | 517 | RVVCAKYALADPSLKMADPN |
| | 518 | SIGMLPRFTPENQRTVALYS |
| | 519 | TVDSIGMLPRFT |
| | 520 | VAVGLRVVCAKY |
| | 521 | VDSIGMLPRFTP |
| | 522 | VGLRVVCAKYAL |
| | 523 | VPEDPEDSALLE |
| | 524 | VTVDSIGMLPRF |
| | 525 | VVAVGLRVVCAK |
| | 526 | YQQGVTVDSIGM |
| | 527 | NKRVFCAAVGRLA |
| | 528 | IPSIQDVAPHHAPAAPANPG |
| | 529 | LKIAGWHGPKPPYTSTLLPP |
| | 530 | RFRGKNLPVLDQLTDPPGVK |
| | 531 | GTTVNCIVEEVDARS |
| | 532 | HVNDMLGRIAVAWCE |
| | 533 | LDYTEVQRRNQLHDL |
| | 534 | YPYDEFVLATGDFVY |
| | 535 | IAVVFKENIAPY |
| | 536 | YMALVSAMERT |
| | 537 | ADMRIYSEALYHPQL |
| | 538 | ATGDIIYMSPFYGYR |
| | 539 | FVMSPFFGLREGSH |

TABLE 4
Sequences of the constructs
DNA and Protein Sequences in Constructs

| | SEQ ID | |
|---|---|---|
| Protein | NO: | Sequence |
| FCoV SPIKE; Protein | 540 | MILLILALLSTAKSEDAPHGVTLPYFNTSYDNNKFELNFYNFLQTWDIPPN |
| Sequence | | TETILGGYLPYCGNGVNCGWYNFVYGRPVGSNGKYAYINTQNLNIPNVHGV |
| | | YFDVREHNSDGVWDTRDRVGLLTATHGSAHYSTIMVTQDSVEENQPHFAVK |
| | | ICHWKPGNISSYHQFNVEFGDGGQCVFNKRFSLDTVLTINDFYGFQWTDTY |
| | | VDIYLGGTITKVWIANDWSVVESSISYHWNQLNYGYYIQFVNRITFYIYNN |
| | | TGGSNYTHLRLSECHGAYCAGYAKNVFVPIDGKIPESFSFSNWFLLSDKST |
| | | LVQGRILSKQPVFVQCLRPVPLWSNNSAVVYFKNDAFCHNVTTDVLRFNLN |
| | | FSDTDIYIESTKDDQLHFTFEDNTTASIACYSSAN |
| | | VTDFQPANNSVSHIPFGKTAYFCFATFSHSVVSRQFLGILPPIVREFAFGR |
| | | DGSIFVNGYKYFSLPPIKSVNFSISSVEQYGFWTIAYTNYTDVMVDVNGTG |
| | | ITRLFYCDSPLNRIKCQQLKYELPDGFYSASMLVKKDLPKTFVTMPQFYNW |
| | | MNVTLHVVLNDTEKKPDTILAKAPELASLADIHFEVAQSNGSVTNVTSICV |
| | | QTRQLALFYKYTSLQGLYTYSNLVELQNYDCPFSPQQFNNYLQFETLCFDV |
| | | NPAVAGCKWSLVHDTRWRTQFATITVSYKEGSMITTMPSSQLGFQDISVLV |
| | | KDECTDYNIYGFQGTGVIRNTTSRLVAGLYYTSISGDLLAFKNSTTGEIFT |
| | | VVPCDLTAQAAVINDEIVGVITSVNQTDLFEFVNHTSTRRSRIAAVPQAAT |
| | | TYTMPQFYYITKWNNDTSTNCTSVITYSSFAICNTGEIKYVNVTHVEVVVV |
| | | KPVSTGNITIPKNFTVAVQAEYIQIQVKPVAVDCAKYVCNGNRHCLNLLTQ |
| | | YTSACQTIENALNLGARLESLMLNDMITVSYRSLELATVEKFNTTVVGGEK |
| | | LGGFYFDGLRALLPPTIGKRSAVEDLLFNKVVTSGLGTVDDDYKKCSSGTD |
| | | VADLVCAQYYNGIMVLPGVVDGNKMAMYTASLIGGMALGSITSAVAVPFAM |
| | | QVQARLNYVALQTDVLQENQKILANAFNNAIGNITLALGKVSNAITTTSYG |
| | | FNSMALALTKIQSVVNQQGEALSQLTSQLQKNFQAISSSIAEIYNRLEKVE |
| | | ADAQVDRLITGRLAALNAYVSQTLTQYAEVKASRQLAMEKVNECVKSQSDR |
| | | YGFCGNGTHLFSLVNSAPDGLLFFHTVLLPTEWEEVTAWSGICVNDTYAYV |
| | | LKDFEYSIFSYNNTYMVTPRNMFQPRKPHMSDFVQITSCEVTFLNTTYTTF |
| | | QEIVIDYIDINKTISDMLEQYNPNHTIPDLDLQLEIFNQTKINLTAEIDQL |
| | | EQRADNLTTIAHELQQYIDNLNKTLVDLEWLNRIETYVKWPWYVWLLIGLV |
| | | VVFCIPLLLFCCLSTGCCGCFGCLGSCCNSFCSRRQFESYEPIEKVHIH |
| FCoV SPIKE; DNA | 541 | atgatattgctaatactagctctacttagcactgctaagtctgaagatgct |
| Sequence | | cctcatggtgtcaccttaccgtactttaacacttcctatgacaataacaag |
| | | tttgaacttaatttctataatttccttcaaacttgggatataccaccaaat |
| | | acggaaactattcttggtggttacctgccatattgtggaaacggtgtaaat |
| | | tgtgggtggtataattttgtttatggtcgacctgtgggatctaatggtaag |
| | | tatgcatacataaacacgcaaaacctgaacatacctaatgtccatggtgtc |
| | | tacttcgatgtgagagaacataattctgatggcgtgtgggacacgcgagat |
| | | cgcgttggcttattgatagccattcatggctccgcgcattacagtctacta |
| | | atggttttacaagactcggtggaagagaatcagcctcattttgctgttaaa |
| | | atctgccattggaaaccaggtaacataagttcctatcatcaatttaatgtt |
| | | gagtttggagacggaggccaatgtgtgtttaacaagagattctcattggac |
| | | acagtgttgacaactaatgacttttatggcttccagtggactgatacatat |
| | | gtggatatctatttaggtggcactattactaaagtgtggattgccaatgat |
| | | tggagtgttgttgaatctagtatctcctatcactggaaccagcttaattat |
| | | ggatattacatccaatttgtcaaccgcactaccttttacatctataataat |
| | | actggtggttcaaattatacccatttgcgactcagcgagtgccacggagcg |
| | | tattgtgctggttatgctaaaaatgtctttgtgccaattgatggcaaaata |
| | | ccagaaagcttttcttttagtaactggtttctgttatcagacaagtctaca |
| | | ttggtgcaaggccgcattcttagcaaacagccagtgtttgtacaatgtctt |
| | | aggcctgtaccattgtggtctaacaatagtgctgtggtgtattttaaaaat |
| | | gatgctttctgccacaatgttacgacagatgttttgaggttcaatctaaac |
| | | tttagtgatactgatatctacatagagtcaactaaggatgatcaattgcac |
| | | ttcacatttgaagataatacaactgcctctatagcctgttatagcagtgcc |
| | | aacgttactgatttccagcctgcaaacaatagtgtctctcatattccattt |
| | | ggcaagactgcgtatttctgttttgccactttctctcactctgttgtgagc |
| | | agacagtttctgggcatactcccaccaattgttcgagagtttgcatttggc |
| | | agagatggatccatttttgttaatggctataaatattttagtctaccacct |
| | | atcaagagtgtcaatttttccattagctcagttgagcagtatggattttgg |
| | | accatagcttacactaactatacagacgtaatggtggatgttaacggcaca |
| | | ggtattactaggttattctattgtgactcaccactcaatagaattaagtgt |
| | | caacaattgaagtatgagctaccagacggtttttattctgctagtatgctc |
| | | gttaaaaaggacctacctaaaacatttgtcaccatgccacagttttacaac |
| | | tggatgaacgtcacgttacatgttgtattaaatgacacagagaaaaaacct |
| | | gacactattcttgctaaggctcctgagctagcatcacttgcggatatacat |
| | | tttgaagtagctcagtctaatggtagtgtaacgaatgtcactagtatatgt |
| | | gtccaaacaagacagttggctctattttataagtacaccagcttacaaggt |
| | | ttgtacacttattctaacctagtggagttacaaaattatgactgccctttt |
| | | tcaccacaacagtttaataattatctgcagtttgagactttgtgttttgat |
| | | gtgaatccagctgttgcaggttgtaagtggtcgttagtccatgacactagg |
| | | tggcgtacccaattcgccactatcacagtttcttacaaagagggttctatg |
| | | atcactactatgccaagttcacagttgggttttcaagatatctctgttttg |
| | | gtaaaagacgaatgcactgattacaacatttatggatttcagggcacaggt |
| | | gttattagaaataccacctctaggttagtggctggtctctattacacatct |
| | | attagtggcgaccttcttgcttttaaaaatagtactactggggaaattttc |
| | | actgtagtgccatgtgacttaacagctcaagctgcagttattaatgacgaa |
| | | atagttggagttataacatccgttaatcaaactgatctgtttgagtttgta |
| | | aaccacacatcaactcgaagatcgcgcatagcagcagtgccacaagcggca |
| | | actacctatactatgccgcaattttattacataacaaagtggaataatgac |
| | | acctcgactaattgtacatctgtcattacctattcctcctttgctatttgt |
| | | aatactggtgaaattaaatatgttaatgttactcatgttgaagttgtagtt |
| | | gttaaacctgtttcaacaggtaacataactatacctaaaaatttcacggtt |
| | | gcagtacaagccgaatacattcagattcaagtaaagcctgttgctgtggat |
| | | tgtgctaagtatgtctgtaatggtaatagacattgccttaacttgttaaca |
| | | caatacacctcagcttgtcaaacaatagaaaatgccctcaatcttggtgca |
| | | cgccttgaatctttaatgcttaatgatatgattacagtatcatatcgcagt |
| | | ctagagcttgcaactgttgaaaagtttaacactactgttgtaggtggtgaa |
| | | aagcttggtggtttctattttgacggtttgagagccttgctaccacctaca |
| | | attggtaaacggtcagctgttgaagacctattgttcaacaaagtggtgacc |
| | | agcggtcttggcaccgttgacgatgactataaaaagtgttcttctggcact |
| | | gatgttgcagatttagtttgtgcccaatattacaatggcataatggtttta |
| | | cctggtgttgtggatggcaataagatggctatgtataccgcatccttaatt |
| | | ggcggtatggccttgggttctattacatctgctgtagccgtccctttcgct |
| | | atgcaagtgcaggcacggctcaattatgttgcactacaaactgatgtttta |
| | | caggaaaaccagaaaatacttgctaatgctttcaataatgccattggtaac |
| | | attactttagcgcttggaaaagtctccaatgctattacaaccacatcatat |
| | | ggttttaatagtatggccttggcactgactaaaattcagagtgtggttaac |
| | | caacagggtgaggcgttgagtcaacttaccagtcagttacagaaaaatttc |
| | | caggctattagtagttctattgctgaaatctacaatagactggaaaaagtg |
| | | gaagctgatgctcaagttgaccgtctcatcaccgggagattagcagcactt |
| | | aatgcttatgtgtctcaaactttaactcaatatgctgaagtcaaggctagt |
| | | agacaattggcaatggagaaggttaatgagtgcgtgaagtcccagtcggat |
| | | aggtatgggttctgtggaaatggaacacacctattctcacttgtcaattct |
| | | gcacctgatggtttacttttctttcacacagtgttacttcctacagaatgg |
| | | gaagaggtgacggcatggtcaggaatatgtgttaatgacacatatgcatat |
| | | gtgttgaaagactttgaatattctatttttagctataacaatacgtatatg |
| | | gtgactcctcgtaatatgtttcaacctagaaaacctcatatgagtgatttc |
| | | gttcaaattacgagctgtgaagtgacttttcttaacactacatatacgaca |
| | | tttcaggagattgtgattgattatattgatatcaacaagactatctctgat |
| | | atgcttgaacagtataatcctaatcacacaatacctgatttagatttacag |
| | | ctagaaatctttaaccagacaaagttaaacctcactgcagaaatagaccaa |
| | | ttagaacaaagagcagataacctcactaccatcgcacatgaactacagcag |
| | | tacattgacaaccttaataagacccttgttgaccttgaatggctcaatagg |
| | | attgaaacttatgtaaaatggccgtggtatgtgtggctactaattggacta |
| | | gtagttgtcttttgcataccattgttgctgttttgctgtctgagtactggt |
| | | tgttgtgggtgttttggttgtcttggaagttgttgtaattccttttgtagt |
| | | agaagacaatttgaaagttacgaacccattgaaaaggttcacattcattaa |
| FCoV S-WT; Protein | 633 | MILLLILLAVVRSEDAPHGVTLPHFNTSYNNAKFELNFYNFLQTWDIPPNT |
| Sequence | | ETILGGYLPYCGKGDNCGWYNFAYQQHDALNGKYAYINTQNLNIPNVHGVY |
| | | FDVRERYYDDGVWDIADRVGLLIAIHGNSYYSLLMVLQDDVEENKPHVAVK |
| | | ICHWRPGNISTYHQFNVDLGDGGQCVFNQRFSLDTKLTADDFYGFQWTDTY |
| | | VDIYLGGTITKVWVDNDWSIVEASISYHWNRVNYGYYMQFVNRTTYYAYNN |
| | | TGGSNYNHLQ;SECNSDYCAGYAKNVFVPTDGKTPESFSFSNWFLLSDKST |
| | | LVQGRVLSSQPVIVQCLRPVPSWSNNTAMVYFTNDVSCPNVTADVLRFNLN |
| | | FSDTDVYTESTKDDQLYFTFEDNTTASIACYSSANVTDFQPANNSVSHVPF |
| | | GKTAHSYFCFANFSHSLVSRQFLGILPPTVREFAFGRDGSIFVNGYKYFSL |
| | | PPIKSVNFSISSVEQYGFWTIAYTNYTDVMVDVNGTGITRLFYCDSPLNRI |
| | | KCQQLKHELPDGFYSASMLVKKDLPKTFVTMPQFYNWMNVTLHVVLNDTEK |
| | | RADIILAKAPELASLADIHFEIAQANGSVTNVTSLCVQARQLALFYKYTSL |
| | | QGLYTYSNLVELQNYDCPFSPQQFNNYLQFETLCLDVNPAVAGCKWSLVHD |
| | | NKWRTQFATITVSYKEGAMITTMPKAQLGFQDISNLVKDECTDYNIYGFQG |
| | | TGIIRNTTSRLVAGLYYTSISGDLLAFKNSTTGEIFTVVPCDLTAQAAVIN |
| | | DEIVGAITAVNQTDLFEFVNHTQSRRSRRSTLETVQTYTMPQFYYITKWNN |
| | | DTSTNCTSVITYSSFAICNTGEIKYVNVTHVETVDDNIGVIKPISTGNISI |
| | | PKNFTVAVQAEYIQIQVKPVVVDCAKYVCNGNRHCLSLLTQYTSACQTIEN |
| | | ALNLGARLESLMLNDMITVSDRSLELATVEKFNTTALGGEKIGGFYFDGLS |
| | | SLLPPKIGKRSAVEDLLFNKVVTSGLGTVDDDYKKCSAGTDVADLVCAQYY |
| | | NGIMVLPGVVDHNKMAIYTASLIGGMAMGSITSAVAVPFAMQVQARLNYVA |
| | | LQTDVLQENQKILANAFNNAIGNITLALGKVSNAITTISDGFNSMASALTK |
| | | IQSVVNQQGEALSQLTSQLQKNFQAISSSIAEIYNRLEKVEADAQVDRLIT |
| | | GRLAALNAYVSQTLTQYAEVKASRQLAMEKVNECVKSQSDRYGFCGNGTHL |
| | | FSLVNSAPDGLLFFHTVLLPTEWEEVTAWSGICVNDTYAYVLKDFEYSIFS |
| | | YNNTYMVTPRNMFQPRKPQMSDFVQITSCEVTFLNTTYTTFQEIVIDYIDI |
| | | NKTTSDMLEQYNPNYTTPELDLQLEIFNQTKLNLTAETDQLEQRADNLTNI |
| | | AHELQQYIDNLNKTLVDLEWLNRIETYVKWPWYVWLLIGLVVVFCIPLLLF |
| | | CCLSTGCCGCFGCLGSCCHSLCSRRQFESYEPIEKVHIH* |
| FCoV S-WT; DNA | 634 | GAATTCGGCTTTAATACGACTCACTATAAGGACATTAGCTTCTGACACAAC |
| Sequence | | TGTGTTCACTAGCAACCTCAAACAGCCACCatgatactgttacttacactt |
| | | ctggccgttgtcaggtctgaagatgctcctcatggtgttactctacctcac |
| | | ttcaatacgtcttataacaatgccaagtttgaacttaatttttacaatttc |
| | | ttacaaacttgggatataccaccaaacacagaaaccattttgggcggttat |
| | | ctgccatattgtggaaaaggtgataattgtggatggtataattttgcttat |
| | | cagcaacatgatgctctaaatggtaagtacgcttacataaacacacaaaat |
| | | ctgaatataccaaacgttcatggcgtctacttcgacGTGcgagaaaggtat |
| | | tatgatgatggcgtgtgggatatagctgatagagttggtctattgattgcc |
| | | atacatGGAaattcgtattacagtttgcttatggttttacaagatgacgtg |
| | | gaagaaaataagcctcacgttgcagttaaaatctgccattggaggccaggt |
| | | aatataagcacttaccatcaatttaatgttgatttaggagacggtggtcaa |
| | | tgcgtgtttaaccagagattctcattggacaccaaattgacagctgatgat |
| | | ttttatggcttccagtggactgatacatatgtagacatatatttaggtggc |
| | | actattactaaagtgtgggttgacaatgactggagtattgttgaagccagt |
| | | atttcctaccattggaatcgcgttaactatggctactacatgcaatttgtc |
| | | aaccgcaccacgtattatgcctacaataatactggtggttcaaattacaac |
| | | catctgcagttgagcgagtgcaatagtgattattgtgctggttatgctaag |
| | | aacgtctttgtgccaattgatggcaaaataccagaaagcttttcttttagt |
| | | aactggtttctgctatcagataaatccaccttagtgcaagggcgtgttctt |
| | | agtagtcagccggttcttgtacaatgtctcaggcctgtaccatcgtggtct |
| | | aacaatactgctatggtgtattttacaaatgatgtctcttgccctaacgtc |
| | | acggcagacgttctgaggttcaatctaaattttagtgacactgatgtttat |
| | | acggagtcaactaaggatgatcagttgtatttcacattcgaagataataca |
| | | actgcttctatagcctgttatagcagtgctaatgttactgacttccaacca |
| | | gcaaataatagcgtctcacatgttccatttggtaaaactgcgcattcttat |
| | | ttctgttttgccaatttttctcactctcttgtgagtagacagtttctgggc |
| | | atacttccaccaactgttcgagagtttgctttcggcagagatggatccatt |
| | | tttgttaatggttataaatactttagtctaccacctattaagagtgttaat |
| | | ttctccattagctcagttgagcagtatggcttttggaccatagcctacact |
| | | aactacacagatgtaatggtggatgttaatggaacaggtattactaggttg |
| | | ttctattgtgactcacccctcaataggattaagtgccaacaattgaagcat |
| | | gaactaccagatgggttttattctgctagcatgcttgtcaaaaaggatcta |
| | | cctaaaacatttgtaactatgccacaattttataactggatgaatgttacg |
| | | ttacatgtcgtgttgaatgacactgagaagagagctgatattatcttggct |
| | | aaggctccagaactagcctcacttgctgatatacattttgaaatagcccag |
| | | gctaatggcagtgtaactaatgttactagcctatgtgtacaagcaagacag |
| | | ttagctctattttataagtatactagcttacaaggtttgtatacctattct |
| | | aatcttgtggagttacaaaattatgactgtcctttttcgccacagcagttt |
| | | aataattatttgcagtttgaaactttgtgtcttgatgtaaatccagctgtt |
| | | gcaggttgtaagtggtcgttagtccatgataataagtggcgcacacagttc |
| | | gccactatcactgtttcctacaaagaaggtgctatgattacaactatgcca |
| | | aaagcacagctgggcttccaagatatttctaatttggtaaaagatgaatgc |
| | | actgattacaacatatatggatttcagggcacaggcattattagaaatacc |
| | | acctcacgtttagtggctggcctctactacacatctatcagtggcgacctt |
| | | cttgcttttaaaaatagtactactggggaaattttcactgtagtgccatgt |
| | | gatttaacagcacaggcagctgtgattaacgatgaaatagtgggagctata |
| | | acagccgttaatcaaactgatctatttgaatttgtcaatcacacacagtcg |
| | | agaaggtcacgtaggtcaacactagaaacagtacaaacctacactatgccg |
| | | caattttattacataacaaagtggaataatgacacatcgactaattgtacg |
| | | tctgtcattacgtactcctcctttgctatttgtaatactggtgaaattaaa |
| | | tatgttaatgtcactcatgttgaaacggtggatgataatatcggtgttatc |
| | | aaacctatttcaacaggtaacatatctatacctaaaaatttcacagtggca |
| | | gtgcaagctgaatatattcagattcaagtcaaacctgttgttgtagattgt |
| | | gccaagtacgtctgcaatggtaatagacattgccttagcttgctaacacaa |
| | | tacacatcagcttgtcaaacgattgaaaatgcccttaatcttggtgcacgt |
| | | cttgaatctttgatgcttaacgatatgatcacagtgtcagatcgtagtctg |
| | | gaacttgcaaccgttgaaaagtttaataccactgctctaggtggtgaaaaa |
| | | atcggtggtttttactttgatggcttgagtagtctgttaccacctaaaata |
| | | ggtaagaggtctgctgttgaggatttattgtttaataaggtggtaaccagt |
| | | ggtcttggtactgttgatgatgattataaaaagtgctcagccggcactgat |
| | | gtagctgacttagtttgtgcccaatattacaatggcataatggttttacct |
| | | ggtgttgtagaccacaataagatggctatctatactgcctctctaatagga |
| | | ggtatggccatgggctctattacatctgctgtggctgtcccttttgcaatg |
| | | caagtgcaggctaggcttaattatgttgcattgcaaacggatgtcctacag |
| | | gaaaaccagaaaatacttgctaatgcctttaataatgccattggtaacatt |
| | | acactagcacttggaaaagtttccaatgctattacgaccatatcagatggt |
| | | tttaatagtatggcttcagcactgactaagatccagagtgtagttaatcag |
| | | cagggtgaagcgttgagtcaacttaccagtcagttacagaaaaacttccaa |
| | | gctattagtagttccattgctgaaatttacaatagattggaaaaagtggaa |
| | | gctgatgctcaagttgatcgtctcattactggtagattggcagcacttaat |
| | | gcttatgtatcccaaactttaactcagtatgctgaagtcaaggctagtaga |
| | | caacttgcaatggaaaaagttaatgagtgtgtgaaatcacagtcggatagg |
| | | tatggtttctgtggcaatggaacccacttattctctcttgtcaattctgca |
| | | cctgatggtttgcttttctttcacacagtgttacttcctacggagtgggaa |
| | | gaggtgacggcatggtcaggaatatgtgttaacgacacatatgcatatgtg |
| | | ttgaaagattttgaatattctattttcagctacaataacacgtatatggtg |
| | | actcctcgtaatatgttccagcctagaaaacctcagatgagtgatttcgtg |
| | | caaattacgagctgtgaagtgacattcctgaacactacatatacgacattt |
| | | caggagattgtgattgattatattgatatcaacaagactatctctgatatg |
| | | cttgaacaatataaccccaactacacgacacctgaattagatttacagctg |
| | | gaaatcttcaatcagacaaagttaaatctcactgcagaaatagaccaattg |
| | | gaacaaagagctgacaatcttacgaacatagcacacgaactacaacagtac |
| | | attgacaatcttaataagacacttgttgaccttgaatggctcaacaggatt |
| | | gaaacttatgtaaaatggccttggtatgtgtggctacttattggtttagta |
| | | gtcgtcttctgcatacctttgttactgttttgctgtcttagtactggttgc |
| | | tgtgggtgctttggttgtcttggcagttgttgtcactctctttgtagtaga |
| | | cgtcaatttgaaagctatgaacctattgaaaaggttcacattcattaaTGA |
| | | CGTACGGCTGGAGCCTCGGTGGCCTAGCTTCTTGCCCCTTGGGCCTCCCCC |
| | | CAGCCCCTCCTCCCCTTCCTGCACCCGTACCCCCGTGGTCTTTGAATAAAG |
| | | TCTGAGTGGGCGGCAaaaaaaaaaaaaaaaaaaaaaaaaaaaaagcatatg |
| | | actaaaaaaaaaaaaaaaaaaaaaaaaaaaaaaaaaaaaaaaaaaaaaaaa |
| | | aaaaaaaaaaaaaaaaaaaaaaAAAAGAAGAGCAAGCTT |
| FCoV S-2P; Protein | 635 | MILLLTLLAVVRSEDAAKNVFVPIDGKIPESFSFSNWFLLTDKSTLVQGRV |
| Sequence | | LSKQPVFVQCLRPVPTSSNVTAVVHFKNDVFCPNVTADVLRFNLNFSDSNY |
| | | TESNNTDQLYFTFEDNTTASIACYSSANVTDFQPANNSVSHIPFGKTTHSY |
| | | FCFANFSHSVVSRQFLGILPPTVREFAFGRDGSIFVNGYKYFSLPPIKSVN |
| | | FSITPVSNNTFWTIAYTNYTDVMVDVNGTGITRLFYCDSPLNRIKCQQLKH |
| | | ELPDGFYSASMLVKKDLPKTFVTMPQFYNWMNVTLHVVLNDTEKKADIILA |
| | | KAPELASLADIHFEIAQANGSVTNVTSLCVQTRQLALFYKYTSLQGLYTYS |
| | | NLVELQNYDCPFSPQQFNNYLQFETLCFDVNPAVAGCKWSLVHDVKWRTQF |
| | | ATITVSYKDGAMITTMPKAQLGFQDISNLVKDECTDYNIYGFQGTGIIRNT |
| | | TSRLVAGLYYTSASGDLLAFKNSTTGEIFTVVPCDLTAQAAVINDEIVGAI |
| | | TAVNQTDLFEFVGGNGSVTTYTMPQFYYITKWNNDTSTNCTSVITYSSFAI |
| | | CNTGEIKYVNVTHVEIVDDSIGVIKPISTGNITIPKNFTVAVQAEYIQIQV |
| | | KPVVVDCAKYVCNGNRHCLSLLTQYTSACQTIENALNLGARLESLMLNDMI |
| | | TVSDRSLELATVEKFNTTVLGGEKLGGFYFDGLSSLLPPTIGKRSAVEDLL |
| | | FNKVVTSGLGTVDDDYKKCSAGTDVADLVCAQYYNGIMVLPGVVDDNKMAM |
| | | YTASLIGGMAMGSITSAVAVPFAMQVQARLNYVALQTDVLQENQKILANAF |
| | | NNAIGNITLALGKVSNAITTISDGFNTMASALTKIQSVVNQQGEALSQLIS |
| | | QTQKNFQATSSSTAETYNRLEPPFADAQVDRTTTGRTAATNAYVSQTLTQY |
| | | AEVKASRQLAMEKVNECVKSQSDRYGFCGNGTHLESLVNSAPDGLLFFHTV |
| | | LLPTEWEEVTAWSGICVNDTYAYVLKDFEYSIFSYNNTYMVTPRNMFQPRK |
| | | PQMSDFVQITSCEVTFLNTTYSTFQEIVIDYIDINKTIADMLEQYNPNYTT |
| | | PELDLQLEIFNQTKLNLTAEIDQLEQRADNLTTIAHELQQYIDNLNKTLVD |
| | | LEWLNRIETYVKWPWYVWLLIGLVVVFCIPLLLFCCLSTGCCGCFGCLGSC |
| | | CHSLCSRRQFESYEPIEKVHIH* |
| FCoV S-2P; DNA | 636 | GAATTCGGCTTTAATACGACTCACTATAAGGACATTAGCTTCTGACACAAC |
| Sequence | | TGTGTTCACTAGCAACCTCAAACAGCCACCATGATTCTGCTGCTGACTCTG |
| | | TTAGCAGTGGTCAGAAGTGAGGATGCTGCTAAGAATGTGTTTGTCCCTATA |
| | | GATGGCAAGATCCCAGAATCCTTCAGCTTCTCGAACTGGTTCCTGTTGACC |
| | | GACAAGAGCACTTTGGTCCAGGGACGCGTGCTGAGCAAACAACCAGTCTTC |
| | | GTCCAGTGCCTCCGCCCAGTGCCAACAAGCAGCAACGTCACAGCGGTTGTG |
| | | CACTTTAAAAATGATGTCTTCSGTCCAAATGTTACCGCTGATGTGCTTAGA |
| | | TTCAATCTCAACTTTTCTGATTCCAATTACACAGAATCCAACAACACGGAC |
| | | CAGCTCTACTTCACTTTCGAGGACAACACAACCGCTAGTATCGCCTGCTAC |
| | | TCCTCAGCGAATGTTACCGATTTCCAACCAGCCAACAATAGCGTGAGTCAC |
| | | ATCCCTTTTGGGAAGACAACCCACAGCTACTTCTGCTTCGCAAATTTCAGT |
| | | CATTCTGTCGTTAGCCGGCAATTCTTGGGGATCCTGCCGCCTACCGTGCGG |
| | | GAGTTTGCCTTCGGACGGGACGGCTCGATCTTTGTCAACGGCTACAAGTAT |
| | | TTTAGTCTCCCGCCGATCAAATCGGTGAACTTCTCAATTACACCTGTCTCC |
| | | AATAATACCTTCTGGACAATTGCATACACAAATTACACAGATGTGATGGTG |
| | | GATGTTAACGGGACAGGAATTACCAGGCTgTTCTACTGTGACAGTCCTTTG |
| | | AACAGGATAAAGTGCcaGCAGTTGAAGCATGAACTGCCAGATGGGTTCTAT |
| | | TCTGCTTCCATGCTGGTCAAGAAAGATCTCCCAAAAACGTTCGTGACAATG |
| | | CCTCAATTCTACAACTGGATGAACGTAACCCTGCACGTCGTACTAAATGAT |
| | | ACCGAGAAGAAGGCTGATATCATCCTCGCAAAGGCTCCAGAGCTGGCTTCC |
| | | CTGGCAGATATTCACTTCGAGATTGCACAGGCCAATGGCTCTGTGACGAAT |
| | | GTTACCTCGCTGTGTGTGCAGACGAGGCAGCTGGCCCTCTTCTATAAGTAT |
| | | ACCAGCCTGCAAGGCCTGTATACGTATAGTAATTTGGTGGAATTGCAGAAT |
| | | TATGACTGCCCCTTTTCTCCACAGcagTTTAATAACTACCTGCAATTTGAG |
| | | ACCCTCTGCTTTGATGTAAACCCTGCAGTCGCCGGGTGTAAGTGGTCACTG |
| | | GTGCATGACGTTAAGTGGAGAACCCAGTTTGCTACGATAACAGTGTCGTAC |
| | | AAAGACGGAGCTATGATAACTACTATGCCCAAAGCCCAGCTTGGCTTCCAG |
| | | GACATTTCGAACCTTGTGAAGGATGAATGTACCGACTATAATATCTATGGA |
| | | TTCCAGGGGACAGGCATCATCCGGAACACCACCTCCCGACTGGTGGCCGGC |
| | | TTGTATTACACTTCTGCATCTGGCGATTTGCTAGCCTTTAAGAACTCCACT |
| | | ACTGGGGAGATCTTCACCGTCGTTCCCTGTGATCTGACAGCTCAGGCCGCA |
| | | GTTATTAATGATGAGATTGTCGGTGCCATTACCGCCGTGAACCAGACTGAT |
| | | CTCTTTGAATTTGTGGGCGGTAATGGATCAGTGACTACATACACCATGCCT |
| | | CAGTTTTATTATATCACCAAGTGGAACAATGACACTTCAACCAACTGCACC |
| | | TCTGTCATTACATACTCCAGCTTTGCTATCTGCAACACAGGAGAAATCAAG |
| | | TACGTCAATGTAACCCATGTGGAGATCGTCGATGATTCAATCGGAGTCATT |
| | | AAACCTATATCAACTGGAAACATCACAATCCCCAAGAATTTTACTGTCGCA |
| | | GTGCAAGCAGAGTACATTCAGATCCAGGTCAAGCCTGTAGTGGTGGACTGT |
| | | GCCAAATATGTTTGCAATGGAAATAGGCACTGCCTGTCCCTGCTCACTCAG |
| | | TATACTTCAGCCTGTCAAACTATTGAGAATGCACTCAACCTCGGGGCCCGT |
| | | CTTGAGTCACTGATGTTGAATGATATGATCACCGTGTCTGACCGGTCTTTG |
| | | GAACTTGCAACGGTGGAGAAGTTCAACACCACAGTACTTGGAGGAGAAAAA |
| | | CTCGGTGGCTTCTACTTTGACGGGCTGAGTTCTCTATTGCCTCCAACCATC |
| | | GGAAAGAGGAGCGCTGTGGAAGACCTGTTATTCAATAAAGTTGTTACATCT |
| | | GGTCTGGGCACCGTGGACGATGACTACAAAAAATGTTCCGCAGGCACTGAT |
| | | GTCGCTGACCTGGTGTGCGCCCAGTACTATAATGGTATCATGGTTTTACCC |
| | | GGTGTGGTTGACGATAATAAGATGGCCATGTATACGGCCAGCCTGATAGGC |
| | | GGCATGGCAATGGGCTCCATCACGTCAGCCGTTGCGGTGCCCTTCGCCATG |
| | | CAGGTGCAAGCGCGTCTAAACTACGTGGCGCTTCAGACCGACGTGCTGCAG |
| | | GAAAATCAAAAGATACTAGCCAACGCGTTCAACAATGCTATCGGGAATATT |
| | | ACTCTTGCCTTGGGGAAAGTGAGTAATGCCATCACTACCATCTCTGATGGC |
| | | TTCAACACCATGGCTAGTGCCCTCACCAAGATACAGTCCGTAGTGAATCAG |
| | | CAGGGTGAGGCTCTTAGCCAGTTGATCTCCCAGCTGCAGAAGAACTTTCAA |
| | | GCAATTTCTTCTTCCATAGCTGAAATTTACAACCGCCTGGAgCCACCGGAG |
| | | GCCGATGCCCAGGTAGATAGGCTGATTACAGGGCGTCTCGCCGCTCTTAAT |
| | | GCCTATGTCAGCCAGACCTTGACACAGTACGCAGAGGTTAAAGCAAGTCGG |
| | | CAGTTAGCGATGGAGAAAGTTAATGAGTGCGTGAAATCCCAATCCGACCGG |
| | | TATGGCTTTTGTGGCAATGGAACACACCTGTTTTCGTTGGTGAACAGCGCT |
| | | CCTGACGGTCTCCTATTCTTCCACACCGTGTTGCTGCCCACAGAATGGGAG |
| | | GAGGTGACAGCCTGGAGCGGGATTTGTGTCAACGACACCTATGCCTACGTT |
| | | CTCAAAGACTTTGAATACAGCATTTTTAGTTACAATAACACGTACATGGTC |
| | | ACACCCAGAAACATGTTTCAGCCCCGAAAGCCCCAGATGAGCGATTTTGTT |
| | | CAGATAACCTCGTGTGAAGTGACCTTTCTGAATACTACTTACACCACGTTT |
| | | CAGGAGATCGTCATTGACTATATTGACATAAACAAGACTATTGCTGACATG |
| | | CTTGAACAGTACAACCCAAACTATACTACTCCTGAGTTGGACCTTCAGCTG |
| | | GAGATCTTTAACCAAACAAAACTGAACCTGACTGCAGAAATAGATCAGCTC |
| | | GAGCAGAGAGCCGATAACCTAACAACCATAGCTCATGAGCTCCAGCAATAC |
| | | ATCGACAATCTGAACAAGACTCTTGTAGACCTGGAATGGTTGAACAGAATC |
| | | GAAACATACGTAAAATGGCCCTGGTATGTGTGGCTCCTCATCGGCCTCGTC |
| | | GTAGTGTTCTGCATCCCCCTGTTGCTTTTTTGTTGCCTGTCTACTGGTTGC |
| | | TGTGGTTGTTTTGGATGTCTCGGCAGCTGCTGCCACTCCCTGTGCAGCAGA |
| | | CGCCAGTTCGAGAGCTATGAACCCATCGAGAAGGTTCATATTCATTGATAA |
| | | CGTACGGCTGGAGCCTCGGTGGCCTAGCTTCTTGCCCCTTGGGCCTCCCCC |
| | | CAGCCCCTCCTCCCCTTCCTGCACCCGTACCCCCGTGGTCTTTGAATAAAG |
| | | TCTGAGTGGGCGGCAaaaaaaaaaaaaaaaaaaaaaaaaaaaaagcatatg |
| | | actaaaaaaaaaaaaaaaaaaaaaaaaaaaaaaaaaaaaaaaaaaaaaaaa |
| | | aaaaaaaaaaaaaaaaaaaaaaAAAAGAAGAGCAAGCTT |
| FCoV S-2P2CD; | 637 | MILLLTLLAVVRSEDAAKNVFVPIDGKIPESFSFSNWFLLTDKSTLVQGRV |
| Protein Sequence | | LSKQPVFVQCLRPVPTSSNVTAVVHFKNDVFCPNVTADVLRFNLNFSDSNY |
| | | TESNNTDQLYFTFEDNTTASIACYSSANVTDFQPANNSVSHIPFGKTTHSY |
| | | FCFANFSHSVVSRQFLGILPPTVREFAFGRDGSIFVNGYKYFSLPPIKSVN |
| | | FSITPVSNNTFWTTAYTNYTDVMVDVNGTGTTRLFYCDSPLNRIKCRQLKH |
| | | ELPDGFYSASMLVKKDLPKTFVTMPQFYNWMNVTLHVVLNDTEKKADIILA |
| | | KAPELASLADIHFEIAQANGSVINVTSLCVQTRQLALFYKYTSLQGLYTYS |
| | | NLVELQNYDCPFSPQKFNNYLQFETLCFDVNPAVAGCKWSLVHDVKWRTQF |
| | | ATITVSYKDGAMITTMPKAQLGFQDISNLVKDECTDYNIYGFQGTGIIRNT |
| | | TSRLVAGLYYTSASGDLLAFKNSTTGEIFTVVPCDLTAQAAVINDEIVGAI |
| | | TAVNQTDLFEFVGGNGSVTTYTMPQFYYITKWNNDTSTNCTSVITYSSFAI |
| | | CNTGEIKYVNVTHVEIVDDSIGVIKPISTGNITIPKNFTVAVQAEYIQIQV |
| | | KPVVVDCAKYVCNGNRHCLSLLTQYTSACQTIENALNLGARLESLMLNDMI |
| | | TVSDRSLELATVEKFNTTVLGGEKLGGFYFDGLSSLLPPTIGKRSAVEDLL |
| | | FNKVVTSGLGTVDDDYKKCSAGTDVADLVCAQYYNGIMVLPGVVDDNKMAM |
| | | YTASLIGGMAMGSITSAVAVPFAMQVQARLNYVALQTDVLQENQKILANAF |
| | | NNAIGNITLALGKVSNAITTISDGFNTMASALTKIQSVVNQQGEALSQLIS |
| | | QLQKNFQAISSSIAEIYNRLDPPEADAQVDRLITGRLAALNAYVSQTLTQY |
| | | AEVKASRQLAMEKVNECVKSQSDRYGFCGNGTHLFSLVNSAPDGLLFFHTV |
| | | LLPTEWEEVTAWSGICVNDTYAYVLKDFEYSIFSYNNTYMVTPRNMFQPRK |
| | | PQMSDFVQITSCEVTFLNTTYTTFQEIVIDYIDINKTIADMLEQYNPNYTT |
| | | PELDLQLEIFNQTKLNLTAEIDQLEQRADNLTTIAHELQQYIDNLNKTLVD |
| | | LEWLNRIETYVKWPWYVWLLIGLVVVFCIPLLLFCCLSTGCCGCFGCLGSC |
| | | CHSLCSRRQFESYEPIEKVHIH* |
| FCoV S-2P2CD; | 638 | GAATTCGGCTTTAATACGACTCACTATAAGGACATTAGCTTCTGACACAAC |
| DNA Sequence | | TGTGTTCACTAGCAACCTCAAACAGCCACCATGATTCTGCTGCTGACTCTG |
| | | TTAGCAGTGGTCAGAAGTGAGGATGCTGCTAAGAATGTGTTTGTCCCTATA |
| | | GATGGCAAGATCCCAGAATCCTTCAGCTTCTCGAACTGGTTCCTGTTGACC |
| | | GACAAGAGCACTTTGGTCCAGGGACGCGTGCTGAGCAAACAACCAGTCTTC |
| | | GTCCAGTGCCTCCGCCCAGTGCCAACAAGCAGCAACGTCACAGCGGTTGTG |
| | | CACTTTAAAAATGATGTCTTCTGTCCAAATGTTACCGCTGATGTGCTTAGA |
| | | TTCAATCTCAACTTTTCTGATTCCAATTACACAGAATCCAACAACACGGAC |
| | | CAGCTCTACTTCACTTTCGAGGACAACACAACCGCTAGTATCGCCTGCTAC |
| | | TCCTCAGCGAATGTTACCGATTTCCAACCAGCCAACAATAGCGTGAGTCAC |
| | | ATCCCTTTTGGGAAGACAACCCACAGCTACTTCTGCTTCGCAAATTTCAGT |
| | | CATTCTGTCGTTAGCCGGCAATTCTTGGGGATCCTGCCGCCTACCGTGCGG |
| | | GAGTTTGCCTTCGGACGGGACGGCTCGATCTTTGTCAACGGCTACAAGTAT |
| | | TTTAGTCTCCCGCCGATCAAATCGGTGAACTTCTCAATTACACCTGTCTCC |
| | | AATAATACCTTCTGGACAATTGCATACACAAATTACACAGATGTGATGGTG |
| | | GATGTTAACGGGACAGGAATTACCAGGCTGTTCTACTGTGACAGTCCTTTG |
| | | AACAGGATAAAGTGCAGGCAGTTGAAGCATGAACTGCCAGATGGGTTCTAT |
| | | TCTGCTTCCATGCTGGTCAAGAAAGATCTCCCAAAAACGTTCGTGACAATG |
| | | CCTCAATTCTACAACTGGATGAACGTAACCCTGCACGTCGTACTAAATGAT |
| | | ACCGAGAAGAAGGCTGATATCATCCTCGCAAAGGCTCCAGAGCTGGCTTCC |
| | | CTGGCAGATATTCACTTCGAGATTGCACAGGCCAATGGCTCTGTGACGAAT |
| | | GTTACCTCGCTGTGTGTGCAGACGAGGCAGCTGGCCCTCTTCTATAAGTAT |
| | | ACCAGCCTGCAAGGCCTGTATACGTATAGTAATTTGGTGGAATTGCAGAAT |
| | | TATGACTGCCCCTTTTCTCCACAGAAATTTAATAACTACCTGCAATTTGAG |
| | | ACCCTCTGCTTTGATGTAAACCCTGCAGTCGCCGGGTGTAAGTGGTCACTG |
| | | GTGCATGACGTTAAGTGGAGAACCCAGTTTGCTACGATAACAGTGTCGTAC |
| | | AAAGACGGAGCTATGATAACTACTATGCCCAAAGCCCAGCTTGGCTTCCAG |
| | | GACATTTCGAACCTTGTGAAGGATGAATGTACCGACTATAATATCTATGGA |
| | | TTCCAGGGGACAGGCATCATCCGGAACACCACCTCCCGACTGGTGGCCGGC |
| | | TTGTATTACACTTCTGCATCTGGCGATTTGCTAGCCTTTAAGAACTCCACT |
| | | ACTGGGGAGATCTTCACCGTCGTTCCCTGTGATCTGACAGCTCAGGCCGCA |
| | | GTTATTAATGATGAGATTGTCGGTGCCATTACCGCCGTGAACCAGACTGAT |
| | | CTCTTTGAATTTGTGGGCGGTAATGGATCAGTGACTACATACACCATGCCT |
| | | CAGTTTTATTATATCACCAAGTGGAACAATGACACTTCAACCAACTGCACC |
| | | TCTGTCATTACATACTCCAGCTTTGCTATCTGCAACACAGGAGAAATCAAG |
| | | TACGTCAATGTAACCCATGTGGAGATCGTCGATGATTCAATCGGAGTCATT |
| | | AAACCTATATCAACTGGAAACATCACAATCCCCAAGAATTTTACTGTCGCA |
| | | GTGCAAGCAGAGTACATTCAGATCCAGGTCAAGCCTGTAGTGGTGGACTGT |
| | | GCCAAATATGTTTGCAATGGAAATAGGCACTGCCTGTCCCTGCTCACTCAG |
| | | TATACTTCAGCCTGTCAAACTATTGAGAATGCACTCAACCTCGGGGCCCGT |
| | | CTTGAGTCACTGATGTTGAATGATATGATCACCGTGTCTGACCGGTCTTTG |
| | | GAACTTGCAACGGTGGAGAAGTTCAACACCACAGTACTTGGAGGAGAAAAA |
| | | CTCGGTGGCTTCTACTTTGACGGGCTGAGTTCTCTATTGCCTCCAACCATC |
| | | GGAAAGAGGAGCGCTGTGGAAGACCTGTTATTCAATAAAGTTGTTACATCT |
| | | GGTCTGGGCACCGTGGACGATGACTACAAAAAATGTTCCGCAGGCACTGAT |
| | | GTCGCTGACCTGGTGTGCGCCCAGTACTATAATGGTATCATGGTTTTACCC |
| | | GGTGTGGTTGACGATAATAAGATGGCCATGTATACGGCCAGCCTGATAGGC |
| | | GGCATGGCAATGGGCTCCATCACGTCAGCCGTTGCGGTGCCCTTCGCCATG |
| | | CAGGTGCAAGCGCGTCTAAACTACGTGGCGCTTCAGACCGACGTGCTGCAG |
| | | GAWAATCAAAAGATACTAGCCAACGCGTTCAACAATGCTATCGGGAATATT |
| | | ACTCTTGCCTTGGGGAAAGTGAGTAATGCCATCACTACCATCTCTGATGGC |
| | | TTCAACACCATGGCTAGTGCCCTCACCAAGATACAGTCCGTAGTGAATCAG |
| | | CAGGGTGAGGCTCTTAGCCAGTTGATCTCCCAGCTGCAGAAGAACTTTCAA |
| | | GCAATTTCTTCTTCCATAGCTGAAATTTACAACCGCCTGGACCCACCGGAG |
| | | GCCGATGCCCAGGTAGATAGGCTGATTACAGGGCGTCTCGCCGCTCTTAAT |
| | | GCCTATGTCAGCCAGACCTTGACACAGTACGCAGAGGTTAAAGCAAGTCGG |
| | | CAGTTAGCGATGGAGAAAGTTAATGAGTGCGTGAAATCCCAATCCGACCGG |
| | | TATGGCTTTTGTGGCAATGGAACACACCTGTTTTCGTTGGTGAACAGCGCT |
| | | CCTGACGGTCTCCTATTCTTCCACACCGTGTTGCTGCCCACAGAATGGGAG |
| | | GAGGTGACAGCCTGGAGCGGGATTTGTGTCAACGACACCTATGCCTACGTT |
| | | CTCAAAGACTTTGAATACAGCATTTTTAGTTACAATAACACGTACATGGTC |
| | | ACACCCAGAAACATGTTTCAGCCCCGAAAGCCCCAGATGAGCGATTTTGTT |
| | | CAGATAACCTCGTGTGAAGTGACCTTTCTGAATACTACTTACACCACGTTT |
| | | CAGGAGATCGTCATTGACTATATTGACATAAACAAGACTATTGCTGACATG |
| | | CTTGAACAGTACAACCCAAACTATACTACTCCTGAGTTGGACCTTCAGCTG |
| | | GAGATCTTTAACCAAACAAAACTGAACCTGACTGCAGAAATAGATCAGCTC |
| | | GAGCAGAGAGCCGATAACCTAACAACCATAGCTCATGAGCTCCAGCAATAC |
| | | ATCGACAATCTGAACAAGACTCTTGTAGACCTGGAATGGTTGAACAGAATC |
| | | GAAACATACGTAAAATGGCCCTGGTATGTGTGGCTCCTCATCGGCCTCGTC |
| | | GTAGTGTTCTGCATCCCCCTGTTGCTTTTTTGTTGCCTGTCTACTGGTTGC |
| | | TGTGGTTGTTTTGGATGTCTCGGCAGCTGCTGCCACTCCCTGTGCAGCAGA |
| | | CGCCAGTTCGAGAGCTATGAACCCATCGAGAAGGTTCATATTCATTGATAA |
| | | CGTACGGCTGGAGCCTCGGTGGCCTAGCTTCTTGCCCCTTGGGCCTCCCCC |
| | | CAGCCCCTCCTCCCCTTCCTGCACCCGTACCCCCGTGGTCTTTGAATAAAG |
| | | TCTGAGTGGGCGGCAaaaaaaaaaaaaaaaaaaaaaaaaaaaaagcatatg |
| | | actaaaaaaaaaaaaaaaaaaaaaaaaaaaaaaaaaaaaaaaaaaaaaaaa |
| | | aaaaaaaaaaaaaaaaaaaaaaAAAAGAAGAGCAAGCTT |
| FCoV S-4P; Protein | 639 | MILLLTLLAVVRSEDAAKNVFVPIDGKIPESFSFSNWFLLTDKSTLVQGRV |
| Sequence | | LSKQPVFVQCLRPVPTSSNVTAVVHFKNDVFCPNVTADVLRFNLNFSDSNY |
| | | TESNNTDQLYFTFEDNTTASIACYSSANVTDFQPANNSVSHIPFGKTTHSY |
| | | FCFANFSHSVVSRQFLGILPPTVREFAFGRDGSIFVNGYKYFSLPPIKSVN |
| | | FSITPVSNNTFWTIAYTNYTDVMVDVNGTGITRLFYCDSPLNRIKCQQLKH |
| | | ELPDGFYSASMLVKKDLPKTFVTMPQFYNWMNVTLHVVLNDTEKKADIILA |
| | | KAPELASLADIHFEIAQANGSVTNVTSLCVQTRQLALFYKYTSLQGLYTYS |
| | | NLVELQNYDCPFSPQQFNNYLQFETLCFDVNPAVAGCKWSLVHDVKWRTQF |
| | | ATITVSYKDGAMITTMPKAQLGFQDISNLVKDECTDYNIYGFQGTGIIRNT |
| | | TSRLVAGLYYTSASGDLLAFKNSTIGEIFTVVPCDLIAQAAVINDEIVGAI |
| | | TAVNQTDLFEFVGGNGSVTTYTMPQFYYITKWNNDTSTNCTSVITYSSFAI |
| | | CNTGEIKYVNVTHVEIVDDSIGVIKPISTGNITIPKNFTVAVQAEYIQIQV |
| | | KPVVVDCAKYVCNGNRHCLSLLTQYTSACQTIENALNLGARLESLMLNDMI |
| | | TVSDRSLELATVEKFNTTVLGGEKLGGFYFDGLSSLLPPTIGKRSAVEDLL |
| | | FNKVVTSGLGTVDDDYKKCSAGTDVADLVCAQYYNGIMVLPGVVDDNKMAM |
| | | YTASLIGGMAMGSITSAVAVPFAMQVQARLNYVALQTDVLPENQKILANAF |
| | | NNATGNITLALGKGSNAITTISPGFNTMASALTKTQSVVNQQGEALSQLIS |
| | | QLQKNFQAISSSIAEIYNRLEPPEADAQVDRLITGRLAALNAYVSQTLTQY |
| | | AEVKASRQLAMEKVNECVKSQSDRYGFCGNGTHLFSLVNSAPDGLLFFHTV |
| | | LLPTEWEEVTAWSGICVNDTYAYVLKDFEYSIFSYNNTYMVTPRNMFQPRK |
| | | PQMSDFVQITSCEVTFLNTTYSTFQEIVIDYIDINKTIADMLEQYNPNYTT |
| | | PELDLQLEIFNQTKLNLTAEIDQLEQRADNLTTIAHELQQYIDNLNKTLVD |
| | | LEWLNRIETYVKWPWYVWLLIGLVVVFCIPLLLFCCLSTGCCGCFGCLGSC |
| | | CHSLCSRRQFESYEPIEKVHIH* |
| FCoV S-4P; DNA | 640 | GAATTCGGCTTTAATACGACTCACTATAAGGACATTAGCTTCTGACACAAC |
| Sequence | | TGTGTTCACTAGCAACCTCAAACAGCCACCATGATTCTGCTGCTGACTCTG |
| | | TTAGCAGTGGTCAGAAGTGAGGATGCTGCTAAGAATGTGTTTGTCCCTATA |
| | | GATGGCAAGATCCCAGAATCCTTCAGCTTCTCGAACTGGTTCCTGTTGACC |
| | | GACAAGAGCACTTTGGTCCAGGGACGCGTGCTGAGCAAACAACCAGTCTTC |
| | | GTCCAGTGCCTCCGCCCAGTGCCAACAAGCAGCAACGTCACAGCGGTTGTG |
| | | CACTTTAAAAATGATGTCTTCSGTCCAAATGTTACCGCTGATGTGCTTAGA |
| | | TTCAATCTCAACTTTTCTGATTCCAATTACACAGAATCCAACAACACGGAC |
| | | CAGCTCTACTTCACTTTCGAGGACAACACAACCGCTAGTATCGCCTGCTAC |
| | | TCCTCAGCGAATGTTACCGATTTCCAACCAGCCAACAATAGCGTGAGTCAC |
| | | ATCCCTTTTGGGAAGACAACCCACAGCTACTTCTGCTTCGCAAATTTCAGT |
| | | CATTCTGTCGTTAGCCGGCAATTCTTGGGGATCCTGCCGCCTACCGTGCGG |
| | | GAGTTTGCCTTCGGACGGGACGGCTCGATCTTTGTCAACGGCTACAAGTAT |
| | | TTTAGTCTCCCGCCGATCAAATCGGTGAACTTCTCAATTACACCTGTCTCC |
| | | AATAATACCTTCTGGACAATTGCATACACAAATTACACAGATGTGATGGTG |
| | | GATGTTAACGGGACAGGAATTACCAGGCTgTTCTACTGTGACAGTCCTTTG |
| | | AACAGGATAAAGTGCcaGCAGTTGAAGCATGAACTGCCAGATGGGTTCTAT |
| | | TCTGCTTCCATGCTGGTCAAGAAAGATCTCCCAAAAACGTTCGTGACAATG |
| | | CCTCAATTCTACAACTGGATGAACGTAACCCTGCACGTCGTACTAAATGAT |
| | | ACCGAGAAGAAGGCTGATATCATCCTCGCAAAGGCTCCAGAGCTGGCTTCC |
| | | CTGGCAGATATTCACTTCGAGATTGCACAGGCCAATGGCTCTGTGACGAAT |
| | | GTTACCTCGCTGTGTGTGCAGACGAGGCAGCTGGCCCTCTTCTATAAGTAT |
| | | ACCAGCCTGCAAGGCCTGTATACGTATAGTAATTTGGTGGAATTGCAGAAT |
| | | TATGACTGCCCCTTTTCTCCACAGcagTTTAATAACTACCTGCAATTTGAG |
| | | ACCCTCTGCTTTGATGTAAACCCTGCAGTCGCCGGGTGTAAGTGGTCACTG |
| | | GTGCATGACGTTAAGTGGAGAACCCAGTTTGCTACGATAACAGTGTCGTAC |
| | | AAAGACGGAGCTATGATAACTACTATGCCCAAAGCCCAGCTTGGCTTCCAG |
| | | GACATTTCGAACCTTGTGAAGGATGAATGTACCGACTATAATATCTATGGA |
| | | TTCCAGGGGACAGGCATCATCCGGAACACCACCTCCCGACTGGTGGCCGGC |
| | | TTGTATTACACTTCTGCATCTGGCGATTTGCTAGCCTTTAAGAACTCCACT |
| | | ACTGGGGAGATCTTCACCGTCGTTCCCTGTGATCTGACAGCTCAGGCCGCA |
| | | GTTATTAATGATGAGATTGTCGGTGCCATTACCGCCGTGAACCAGACTGAT |
| | | CTCTTTGAATTTGTGGGCGGTAATGGATCAGTGACTACATACACCATGCCT |
| | | CAGTTTTATTATATCACCAAGTGGAACAATGACACTTCAACCAACTGCACC |
| | | TCTGTCATTACATACTCCAGCTTTGCTATCTGCAACACAGGAGAAATCAAG |
| | | TACGTCAATGTAACCCATGTGGAGATCGTCGATGATTCAATCGGAGTCATT |
| | | AAACCTATATCAACTGGAAACATCACAATCCCCAAGAATTTTACTGTCGCA |
| | | GTGCAAGCAGAGTACATTCAGATCCAGGTCAAGCCTGTAGTGGTGGACTGT |
| | | GCCAAATATGTTTGCAATGGAAATAGGCACTGCCTGTCCCTGCTCACTCAG |
| | | TATACTTCAGCCTGTCAAACTATTGAGAATGCACTCAACCTCGGGGCCCGT |
| | | CTTGAGTCACTGATGTTGAATGATATGATCACCGTGTCTGACCGGTCTTTG |
| | | GAACTTGCAACGGTGGAGAAGTTCAACACCACAGTACTTGGAGGAGAAAAA |
| | | CTCGGTGGCTTCTACTTTGACGGGCTGAGTTCTCTATTGCCTCCAACCATC |
| | | GGAAAGAGGAGCGCTGTGGAAGACCTGTTATTCAATAAAGTTGTTACATCT |
| | | GGTCTGGGCACCGTGGACGATGACTACAAAAAATGTTCCGCAGGCACTGAT |
| | | GTCGCTGACCTGGTGTGCGCCCAGTACTATAATGGTATCATGGTTTTACCC |
| | | GGTGTGGTTGACGATAATAAGATGGCCATGTATACGGCCAGCCTGATAGGC |
| | | GGCATGGCAATGGGCTCCATCACGTCAGCCGTTGCGGTGCCCTTCGCCATG |
| | | CAGGTGCAAGCGCGTCTAAACTACGTGGCGCTTCAGACCGACGTGCTGCCG |
| | | GAAAATCAAAAGATACTAGCCAACGCGTTCAACAATGCTATCGGGAATATT |
| | | ACTCTTGCCTTGGGGAAAGGGAGTAATGCCATCACTACCATCTCTccaGGC |
| | | TTCAACACCATGGCTAGTGCCCTCACCAAGATACAGTCCGTAGTGAATCAG |
| | | CAGGGTGAGGCTCTTAGCCAGTTGATCTCCCAGCTGCAGAAGAACTTTCAA |
| | | GCAATTTCTTCTTCCATAGCTGAAATTTACAACCGCCTGGAgCCACCGGAG |
| | | GCCGATGCCCAGGTAGATAGGCTGATTACAGGGCGTCTCGCCGCTCTTAAT |
| | | GCCTATGTCAGCCAGACCTTGACACAGTACGCAGAGGTTAAAGCAAGTCGG |
| | | CAGTTAGCGATGGAGAAAGTTAATGAGTGCGTGAAATCCCAATCCGACCGG |
| | | TATGGCTTTTGTGGCAATGGAACACACCTGTTTTCGTTGGTGAACAGCGCT |
| | | CCTGACGGTCTCCTATTCTTCCACACCGTGTTGCTGCCCACAGAATGGGAG |
| | | GAGGTGACAGCCTGGAGCGGGATTTGTGTCAACGACACCTATGCCTACGTT |
| | | CTCAAAGACTTTGAATACAGCATTTTTAGTTACAATAACACGTACATGGTC |
| | | ACACCCAGAAACATGTTTCAGCCCCGAAAGCCCCAGATGAGCGATTTTGTT |
| | | CAGATAACCTCGTGTGAAGTGACCTTTCTGAATACTACTTACACCACGTTT |
| | | CAGGAGATCGTCATTGACTATATTGACATAAACAAGACTATTGCTGACATG |
| | | CTTGAACAGTACAACCCAAACTATACTACTCCTGAGTTGGACCTTCAGCTG |
| | | GAGATCTTTAACCAAACAAAACTGAACCTGACTGCAGAAATAGATCAGCTC |
| | | GAGCAGAGAGCCGATAACCTAACAACCATAGCTCATGAGCTCCAGCAATAC |
| | | ATCGACAATCTGAACAAGACTCTTGTAGACCTGGAATGGTTGAACAGAATC |
| | | GAAACATACGTAAAATGGCCCTGGTATGTGTGGCTCCTCATCGGCCTCGTC |
| | | GTAGTGTTCTGCATCCCCCTGTTGCTTTTTTGTTGCCTGTCTACTGGTTGC |
| | | TGTGGTTGTTTTGGATGTCTCGGCAGCTGCTGCCACTCCCTGTGCAGCAGA |
| | | CGCCAGTTCGAGAGCTATGAACCCATCGAGAAGGTTCATATTCATTGATAA |
| | | CGTACGGCTGGAGCCTCGGTGGCCTAGCTTCTTGCCCCTTGGGCCTCCCCC |
| | | CAGCCCCTCCTCCCCTTCCTGCACCCGTACCCCCGTGGTCTTTGAATAAAG |
| | | TCTGAGTGGGCGGCAaaaaaaaaaaaaaaaaaaaaaaaaaaaaagcatatg |
| | | actaaaaaaaaaaaaaaaaaaaaaaaaaaaaaaaaaaaaaaaaaaaaaaaa |
| | | aaaaaaaaaaaaaaaaaaaaaaAAAAGAAGAGCAAGCTT |
| FCoV S-2P-HA; | 641 | MILLLTLLAVVRSEDAAKNVFVPIDGKIPESFSFSNWFLLTDKSTLVQGRV |
| Protein Sequence | | LSKQPVFVQCLRPVPTSSNVTAVVHFKNDVFCPNVTADVLRFNLNFSDSNY |
| | | TESNNTDQLYFTFEDNTTASIACYSSANVTDFQPANNSVSHIPFGKTTHSY |
| | | FCFANFSHSVVSRQFLGILPPTVREFAFGRDGSIFVNGYKYFSLPPIKSVN |
| | | FSITPVSNNTFWTIAYTNYTDVMVDVNGTGITRLFYCDSPLNRIKCQQLKH |
| | | ELPDGFYSASMLVKKDLPKTFVTMPQFYNWMNVTLHVVLNDTEKKADIILA |
| | | KAPELASLADIHFEIAQANGSVTNVTSLCVQTRQLALFYKYTSLQGLYTYS |
| | | NLVELQNYDCPFSPQQFNNYLQFETLCFDVNPAVAGCKWSLVHDVKWRTQF |
| | | ATITVSYKDGAMITTMPKAQLGFQDISNLVKDECTDYNIYGFQGTGIIRNT |
| | | TSRLVAGLYYTSASGDLLAFKNSTTGEIFTVVPCDLTAQAAVINDEIVGAI |
| | | TAVNQTDLFEFVGGNGSVTTYTMPQFYYITKWNNDTSTNCTSVITYSSFAI |
| | | CNTGEIKYVNVTHVEIVDDSIGVIKPISTGNITIPKNFTVAVQAEYIQIQV |
| | | KPVVVDCAKYVCNGNRHCLSLLTQYTSACQTIENALNLGARLESLMLNDMI |
| | | TVSDRSLELATVEKFNTTVLGGEKLGGFYFDGLSSLLPPTIGKRSAVEDLL |
| | | FNKVVTSGLGTVDDDYKKCSAGTDVADLVCAQYYNGIMVLPGVVDDNKMAM |
| | | YTASLIGGMAMGSITSAVAVPFAMQVQARLNYVALQTDVLQENQKILANAF |
| | | NNAIGNITLALGKVSNAITTISDGFNTMASALTKIQSVVNQQGEALSQLIS |
| | | QLQKNFQAISSSIAEIYNRLEPPEADAQVDRLITGRLAALNAYVSQTLTQY |
| | | AEVKASRQLAMEKVNECVKSQSDRYGFCGNGTHLFSLVNSAPDGLLFFHTV |
| | | LLPTEWEEVTAWSGICVNDTYAYVLKDFEYSIFSYNNTYMVTPRNMFQPRK |
| | | PQMSDFVQITSCEVTFLNTTYTTFQEIVIDYIDINKTIADMLEQYNPNYTT |
| | | PELDLQLEIFNQTKLNLTAEIDQLEQRADNLTTIAHELQQYIDNLNKTLVD |
| | | LEWLNRIETYVKWPWYVWLLIGLVVVFCIPLLLFCCLSTGCCGCFGCLGSC |
| | | CHSLCSRRQFESYEPIEKVHIHDIYPYDVPDYA* |
| FCoV S-2P-HA; | 642 | GAATTCGGCTTTAATACGACTCACTATAAGGACATTAGCTTCTGACACAAC |
| DNA Sequence | | TGTGTTCACTAGCAACCTCAAACAGCCACCATGATTCTGCTGCTGACTCTG |
| | | TTAGCAGTGGTCAGAAGTGAGGATGCTGCTAAGAATGTGTTTGTCCCTATA |
| | | GATGGCAAGATCCCAGAATCCTTCAGCTTCTCGAACTGGTTCCTGTTGACC |
| | | GACAAGAGCACTTTGGTCCAGGGACGCGTGCTGAGCAAACAACCAGTCTTC |
| | | GTCCAGTGCCTCCGCCCAGTGCCAACAAGCAGCAACGTCACAGCGGTTGTG |
| | | CACTTTAAAAATGATGTCTTCTGTCCAAATGTTACCGCTGATGTGCTTAGA |
| | | TTCAATCTCAACTTTTCTGATTCCAATTACACAGAATCCAACAACACGGAC |
| | | CAGCTCTACTTCACTTTCGAGGACAACACAACCGCTAGTATCGCCTGCTAC |
| | | TCCTCAGCGAATGTTACCGATTTCCAACCAGCCAACAATAGCGTGAGTCAC |
| | | ATCCCTTTTGGGAAGACAACCCACAGCTACTTCTGCTTCGCAAATTTCAGT |
| | | CATTCTGTCGTTAGCCGGCAATTCTTGGGGATCCTGCCGCCTACCGTGCGG |
| | | GAGTTTGCCTTCGGACGGGACGGCTCGATCTTTGTCAACGGCTACAAGTAT |
| | | TTTAGTCTCCCGCCGATCAAATCGGTGAACTTCTCAATTACACCTGTCTCC |
| | | AATAATACCTTCTGGACAATTGCATACACAAATTACACAGATGTGATGGTG |
| | | GATGTTAACGGGACAGGAATTACCAGGCTgTTCTACTGTGACAGTCCTTTG |
| | | AACAGGATAAAGTGCcaGCAGTTGAAGCATGAACTGCCAGATGGGTTCTAT |
| | | TCTGCTTCCATGCTGGTCAAGAAAGATCTCCCAAAAACGTTCGTGACAATG |
| | | CCTCAATTCTACAACTGGATGAACGTAACCCTGCACGTCGTACTAAATGAT |
| | | ACCGAGAAGAAGGCTGATATCATCCTCGCAAAGGCTCCAGAGCTGGCTTCC |
| | | CTGGCAGATATTCACTTCGAGATTGCACAGGCCAATGGCTCTGTGACGAAT |
| | | GTTACCTCGCTGTGTGTGCAGACGAGGCAGCTGGCCCTCTTCTATAAGTAT |
| | | ACCAGCCTGCAAGGCCTGTATACGTATAGTAATTTGGTGGAATTGCAGAAT |
| | | TATGACTGCCCCTTTTCTCCACAGcaqTTTAATAACTACCTGCAATTTGAG |
| | | ACCCTCTGCTTTGATGTAAACCCTGCAGTCGCCGGGTGTAAGTGGTCACTG |
| | | GTGCATGACGTTAAGTGGAGAACCCAGTTTGCTACGATAACAGTGTCGTAC |
| | | AAAGACGGAGCTATGATAACTACTATGCCCAAAGCCCAGCTTGGCTTCCAG |
| | | GACATTTCGAACCTTGTGAAGGATGAATGTACCGACTATAATATCTATGGA |
| | | TTCCAGGGGACAGGCATCATCCGGAACACCACCTCCCGACTGGTGGCCGGC |
| | | TTGTATTACACTTCTGCATCTGGCGATTTGCTAGCCTTTAAGAACTCCACT |
| | | ACTGGGGAGATCTTCACCGTCGTTCCCTGTGATCTGACAGCTCAGGCCGCA |
| | | GTTATTAATGATGAGATTGTCGGTGCCATTACCGCCGTGAACCAGACTGAT |
| | | CTCTTTGAATTTGTGGGCGGTAATGGATCAGTGACTACATACACCATGCCT |
| | | CAGTTTTATTATATCACCAAGTGGAACAATGACACTTCAACCAACTGCACC |
| | | TCTGTCATTACATACTCCAGCTTTGCTATCTGCAACACAGGAGAAATCAAG |
| | | TACGTCAATGTAACCCATGTGGAGATCGTCGATGATTCAATCGGAGTCATT |
| | | AAACCTATATCAACTGGAAACATCACAATCCCCAAGAATTTTACTGTCGCA |
| | | GTGCAAGCAGAGTACATTCAGATCCAGGTCAAGCCTGTAGTGGTGGACTGT |
| | | GCCAAATATGTTTGCAATGGAAATAGGCACTGCCTGTCCCTGCTCACTCAG |
| | | TATACTTCAGCCTGTCAAACTATTGAGAATGCACTCAACCTCGGGGCCCGT |
| | | CTTGAGTCACTGATGTTGAATGATATGATCACCGTGTCTGACCGGTCTTTG |
| | | GAACTTGCAACGGTGGAGAAGTTCAACACCACAGTACTTGGAGGAGAAAAA |
| | | CTCGGTGGCTTCTACTTTGACGGGCTGAGTTCTCTATTGCCTCCAACCATC |
| | | GGAAAGAGGAGCGCTGTGGAAGACCTGTTATTCAATAAAGTTGTTACATCT |
| | | GGTCTGGGCACCGTGGACGATGACTACAAAAAATGTTCCGCAGGCACTGAT |
| | | GTCGCTGACCTGGTGTGCGCCCAGTACTATAATGGTATCATGGTTTTACCC |
| | | GGTGTGGTTGACGATAATAAGATGGCCATGTATACGGCCAGCCTGATAGGC |
| | | GGCATGGCAATGGGCTCCATCACGTCAGCCGTTGCGGTGCCCTTCGCCATG |
| | | CAGGTGCAAGCGCGTCTAAACTACGTGGCGCTTCAGACCGACGTGCTGCAG |
| | | GAAAATCAAAAGATACTAGCCAACGCGTTCAACAATGCTATCGGGAATATT |
| | | ACTCTTGCCTTGGGGAAAGTGAGTAATGCCATCACTACCATCTCTGATGGC |
| | | TTCAACACCATGGCTAGTGCCCTCACCAAGATACAGTCCGTAGTGAATCAG |
| | | CAGGGTGAGGCTCTTAGCCAGTTGATCTCCCAGCTGCAGAAGAACTTTCAA |
| | | GCAATTTCTTCTTCCATAGCTGAAATTTACAACCGCCTGGAgCCACCGGAG |
| | | GCCGATGCCCAGGTAGATAGGCTGATTACAGGGCGTCTCGCCGCTCTTAAT |
| | | GCCTATGTCAGCCAGACCTTGACACAGTACGCAGAGGTTAAAGCAAGTCGG |
| | | CAGTTAGCGATGGAGAAAGTTAATGAGTGCGTGAAATCCCAATCCGACCGG |
| | | TATGGCTTTTGTGGCAATGGAACACACCTGTTTTCGTTGGTGAACAGCGCT |
| | | CCTGACGGTCTCCTATTCTTCCACACCGTGTTGCTGCCCACAGAATGGGAG |
| | | GAGGTGACAGCCTGGAGCGGGATTTGTGTCAACGACACCTATGCCTACGTT |
| | | CTCAAAGACTTTGAATACAGCATTTTTAGTTACAATAACACGTACATGGTC |
| | | ACACCCAGAAACATGTTTCAGCCCCGAAAGCCCCAGATGAGCGATTTTGTT |
| | | CAGATAACCTCGTGTGAAGTGACCTTTCTGAATACTACTTACACCACGTTT |
| | | CAGGAGATCGTCATTGACTATATTGACATAAACAAGACTATTGCTGACATG |
| | | CTTGAACAGTACAACCCAAACTATACTACTCCTGAGTTGGACCTTCAGCTG |
| | | GAGATCTTTAACCAAACAAAACTGAACCTGACTGCAGAAATAGATCAGCTC |
| | | GAGCAGAGAGCCGATAACCTAACAACCATAGCTCATGAGCTCCAGCAATAC |
| | | ATCGACAATCTGAACAAGACTCTTGTAGACCTGGAATGGTTGAACAGAATC |
| | | GAAACATACGTAAAATGGCCCTGGTATGTGTGGCTCCTCATCGGCCTCGTC |
| | | GTAGTGTTCTGCATCCCCCTGTTGCTTTTTTGTTGCCTGTCTACTGGTTGC |
| | | TGTGGTTGTTTTGGATGTCTCGGCAGCTGCTGCCACTCCCTGTGCAGCAGA |
| | | CGCCAGTTCGAGAGCTATGAACCCATCGAGAAGGTTCATATTCATGATATC |
| | | TACCCATACGACGTACCAGATTACGCTTGACGTACGGCTGGAGCCTCGGTG |
| | | GCCTAGCTTCTTGCCCCTTGGGCCTCCCCCCAGCCCCTCCTCCCCTTCCTG |
| | | CACCCGTACCCCCGTGGTCTTTGAATAAAGTCTGAGTGGGCGGCAaaaaaa |
| | | aaaaaaaaaaaaaaaaaaaaaaagcatatgactaaaaaaaaaaaaaaaaaa |
| | | aaaaaaaaaaaaaaaaaaaaaaaaaaaaaaaaaaaaaaaaaaaaaaaaaaa |
| | | aAAAAGAAGAGCAAGCTT |
| FCoV S-4P-HA; | 643 | MILLLTLLAVVRSEDAAKNVFVPIDGKIPESFSFSNWELLTDKSTLVQGRV |
| Protein Sequence | | LSKQPVFVQCLRPVPTSSNVTAVVHFKNDVFCPNVTADVLRENLNFSDSNY |
| | | TESNNTDQLYFTFEDNTTASIACYSSANVTDFQPANNSVSHIPFGKTTHSY |
| | | FCFANFSHSVVSRQFLGILPPTVREFAFGRDGSIFVNGYKYFSLPPIKSVN |
| | | FSITPVSNNTFWTIAYTNYTDVMVDVNGTGITRLFYCDSPLNRIKCQQLKH |
| | | ELPDGFYSASMLVKKDLPKTFVTMPQFYNWMNVTLHVVLNDTEKKADIILA |
| | | KAPELASLADIHFEIAQANGSVTNVTSLCVQTRQLALFYKYTSLQGLYTYS |
| | | NLVELQNYDCPFSPQQFNNYLQFETLCFDVNPAVAGCKWSLVHDVKWRTQF |
| | | ATITVSYKDGAMITTMPKAQLGFQDISNLVKDECTDYNIYGFQGTGIIRNT |
| | | TSRLVAGLYYTSASGDLLAFKNSTTGEIFTVVPCDLTAQAAVINDEIVGAI |
| | | TAVNQTDLFEFVGGNGSVTTYTMPQFYYITKWNNDTSTNCTSVITYSSFAI |
| | | CNTGEIKYVNVTHVEIVDDSIGVIKPISTGNITIPKNFTVAVQAEYIQIQV |
| | | KPVVVDCAKYVCNGNRHCLSLLTQYTSACQTIENALNLGARLESLMLNDMI |
| | | TVSDRSLELATVEKFNTTVLGGEKLGGFYFDGLSSLLPPTIGKRSAVEDLL |
| | | FNKVVTSGTGTVDDDYKKCSAGTDVADLVCAQYYNGTMVLPGVVDDNKMAM |
| | | YTASLIGGMAMGSITSAVAVPFAMQVQARLNYVALQTDVLPENQKILANAF |
| | | NNAIGNITLALGKGSNAITTISPGFNTMASALTKIQSVVNQQGEALSQLIS |
| | | QLQKNFQAISSSIAEIYNRLEPPEADAQVDRLITGRLAALNAYVSQTLTQY |
| | | AEVKASRQLAMEKVNECVKSQSDRYGFCGNGTHLFSLVNSAPDGLLFFHTV |
| | | LLPTEWEEVTAWSGICVNDTYAYVLKDFEYSIFSYNNTYMVTPRNMFQPRK |
| | | PQMSDFVQITSCEVTFLNTTYTTFQEIVIDYIDINKTIADMLEQYNPNYTT |
| | | PELDLQLEIFNQTKLNLTAEIDQLEQRADNLTTIAHELQQYIDNLNKTLVD |
| | | LEWLNRIETYVKWPWYVWLLIGLVVVFCIPLLLFCCLSTGCCGCFGCLGSC |
| | | CHSLCSRRQFESYEPIEKVHIHDIYPYDVPDYA* |
| FCoV S-4P-HA; | 644 | GAATTCGGCTTTAATACGACTCACTATAAGGACATTAGCTTCTGACACAAC |
| DNA Sequence | | TGTGTTCACTAGCAACCTCAAACAGCCACCATGATTCTGCTGCTGACTCTG |
| | | TTAGCAGTGGTCAGAAGTGAGGATGCTGCTAAGAATGTGTTTGTCCCTATA |
| | | GATGGCAAGATCCCAGAATCCTTCAGCTTCTCGAACTGGTTCCTGTTGACC |
| | | GACAAGAGCACTTTGGTCCAGGGACGCGTGCTGAGCAAACAACCAGTCTTC |
| | | GTCCAGTGCCTCCGCCCAGTGCCAACAAGCAGCAACGTCACAGCGGTTGTG |
| | | CACTTTAAAAATGATGTCTTCTGTCCAAATGTTACCGCTGATGTGCTTAGA |
| | | TTCAATCTCAACTTTTCTGATTCCAATTACACAGAATCCAACAACACGGAC |
| | | CAGCTCTACTTCACTTTCGAGGACAACACAACCGCTAGTATCGCCTGCTAC |
| | | TCCTCAGCGAATGTTACCGATTTCCAACCAGCCAACAATAGCGTGAGTCAC |
| | | ATCCCTTTTGGGAAGACAACCCACAGCTACTTCTGCTTCGCAAATTTCAGT |
| | | CATTCTGTCGTTAGCCGGCAATTCTTGGGGATCCTGCCGCCTACCGTGCGG |
| | | GAGTTTGCCTTCGGACGGGACGGCTCGATCTTTGTCAACGGCTACAAGTAT |
| | | TTTAGTCTCCCGCCGATCAAATCGGTGAACTTCTCAATTACACCTGTCTCC |
| | | AATAATACCTTCTGGACAATTGCATACACAAATTACACAGATGTGATGGTG |
| | | GATGTTAACGGGACAGGAATTACCAGGCTgTTCTACTGTGACAGTCCTTTG |
| | | AACAGGATAAAGTGCcaGCAGTTGAAGCATGAACTGCCAGATGGGTTCTAT |
| | | TCTGCTTCCATGCTGGTCAAGAAAGATCTCCCAAAAACGTTCGTGACAATG |
| | | CCTCAATTCTACAACTGGATGAACGTAACCCTGCACGTCGTACTAAATGAT |
| | | ACCGAGAAGAAGGCTGATATCATCCTCGCAAAGGCTCCAGAGCTGGCTTCC |
| | | CTGGCAGATATTCACTTCGAGATTGCACAGGCCAATGGCTCTGTGACGAAT |
| | | GTTACCTCGCTGTGTGTGCAGACGAGGCAGCTGGCCCTCTTCTATAAGTAT |
| | | ACCAGCCTGCAAGGCCTGTATACGTATAGTAATTTGGTGGAATTGCAGAAT |
| | | TATGACTGCCCCTTTTCTCCACAGcagTTTAATAACTACCTGCAATTTGAG |
| | | ACCCTCTGCTTTGATGTAAACCCTGCAGTCGCCGGGTGTAAGTGGTCACTG |
| | | GTGCATGACGTTAAGTGGAGAACCCAGTTTGCTACGATAACAGTGTCGTAC |
| | | AAAGACGGAGCTATGATAACTACTATGCCCAAAGCCCAGCTTGGCTTCCAG |
| | | GACATTTCGAACCTTGTGAAGGATGAATGTACCGACTATAATATCTATGGA |
| | | TTCCAGGGGACAGGCATCATCCGGAACACCACCTCCCGACTGGTGGCCGGC |
| | | TTGTATTACACTTCTGCATCTGGCGATTTGCTAGCCTTTAAGAACTCCACT |
| | | ACTGGGGAGATCTTCACCGTCGTTCCCTGTGATCTGACAGCTCAGGCCGCA |
| | | GTTATTAATGATGAGATTGTCGGTGCCATTACCGCCGTGAACCAGACTGAT |
| | | CTCTTTGAATTTGTGGGCGGTAATGGATCAGTGACTACATACACCATGCCT |
| | | CAGTTTTATTATATCACCAAGTGGAACAATGACACTTCAACCAACTGCACC |
| | | TCTGTCATTACATACTCCAGCTTTGCTATCTGCAACACAGGAGAAATCAAG |
| | | TACGTCAATGTAACCCATGTGGAGATCGTCGATGATTCAATCGGAGTCATT |
| | | AAACCTATATCAACTGGAAACATCACAATCCCCAAGAATTTTACTGTCGCA |
| | | GTGCAAGCAGAGTACATTCAGATCCAGGTCAAGCCTGTAGTGGTGGACTGT |
| | | GCCAAATATGTTTGCAATGGAAATAGGCACTGCCTGTCCCTGCTCACTCAG |
| | | TATACTTCAGCCTGTCAAACTATTGAGAATGCACTCAACCTCGGGGCCCGT |
| | | CTTGAGTCACTGATGTTGAATGATATGATCACCGTGTCTGACCGGTCTTTG |
| | | GAACTTGCAACGGTGGAGAAGTTCAACACCACAGTACTTGGAGGAGAAAAA |
| | | CTCGGTGGCTTCTACTTTGACGGGCTGAGTTCTCTATTGCCTCCAACCATC |
| | | GGAAAGAGGAGCGCTGTGGAAGACCTGTTATTCAATAAAGTTGTTACATCT |
| | | GGTCTGGGCACCGTGGACGATGACTACAAAAAATGTTCCGCAGGCACTGAT |
| | | GTCGCTGACCTGGTGTGCGCCCAGTACTATAATGGTATCATGGTTTTACCC |
| | | GGTGTGGTTGACGATAATAAGATGGCCATGTATACGGCCAGCCTGATAGGC |
| | | GGCATGGCAATGGGCTCCATCACGTCAGCCGTTGCGGTGCCCTTCGCCATG |
| | | CAGGTGCAAGCGCGTCTAAACTACGTGGCGCTTCAGACCGACGTGCTGCCG |
| | | GAAAATCAAAAGATACTAGCCAACGCGTTCAACAATGCTATCGGGAATATT |
| | | ACTCTTGCCTTGGGGAAAGGGAGTAATGCCATCACTACCATCTCTccaGGC |
| | | TTCAACACCATGGCTAGTGCCCTCACCAAGATACAGTCCGTAGTGAATCAG |
| | | CAGGGTGAGGCTCTTAGCCAGTTGATCTCCCAGCTGCAGAAGAACTTTCAA |
| | | GCAATTTCTTCTTCCATAGCTGAAATTTACAACCGCCTGGAgCCACCGGAG |
| | | GCCGATGCCCAGGTAGATAGGCTGATTACAGGGCGTCTCGCCGCTCTTAAT |
| | | GCCTATGTCAGCCAGACCTTGACACAGTACGCAGAGGTTAAAGCAAGTCGG |
| | | CAGTTAGCGATGGAGAAAGTTAATGAGTGCGTGAAATCCCAATCCGACCGG |
| | | TATGGCTTTTGTGGCAATGGAACACACCTGTTTTCGTTGGTGAACAGCGCT |
| | | CCTGACGGTCTCCTATTCTTCCACACCGTGTTGCTGCCCACAGAATGGGAG |
| | | GAGGTGACAGCCTGGAGCGGGATTTGTGTCAACGACACCTATGCCTACGTT |
| | | CTCAAAGACTTTGAATACAGCATTTTTAGTTACAATAACACGTACATGGTC |
| | | ACACCCAGAAACATGTTTCAGCCCCGAAAGCCCCAGATGAGCGATTTTGTT |
| | | CAGATAACCTCGTGTGAAGTGACCTTTCTGAATACTACTTACACCACGTTT |
| | | CAGGAGATCGTCATTGACTATATTGACATAAACAAGACTATTGCTGACATG |
| | | CTTGAACAGTACAACCCAAACTATACTACTCCTGAGTTGGACCTTCAGCTG |
| | | GAGATCTTTAACCAAACAAAACTGAACCTGACTGCAGAAATAGATCAGCTC |
| | | GAGCAGAGAGCCGATAACCTAACAACCATAGCTCATGAGCTCCAGCAATAC |
| | | ATCGACAATCTGAACAAGACTCTTGTAGACCTGGAATGGTTGAACAGAATC |
| | | GAAACATACGTAAAATGGCCCTGGTATGTGTGGCTCCTCATCGGCCTCGTC |
| | | GTAGTGTTCTGCATCCCCCTGTTGCTTTTTTGTTGCCTGTCTACTGGTTGC |
| | | TGTGGTTGTTTTGGATGTCTCGGCAGCTGCTGCCACTCCCTGTGCAGCAGA |
| | | CGCCAGTTCGAGAGCTATGAACCCATCGAGAAGGTTCATATTCATGATATC |
| | | TACCCATACGACGTACCAGATTACGCTTGACGTACGGCTGGAGCCTCGGTG |
| | | GCCTAGCTTCTTGCCCCTTGGGCCTCCCCCCAGCCCCTCCTCCCCTTCCTG |
| | | CACCCGTACCCCCGTGGTCTTTGAATAAAGTCTGAGTGGGCGGCAaaaaaa |
| | | aaaaaaaaaaaaaaaaaaaaaaagcatatgactaaaaaaaaaaaaaaaaaa |
| | | aaaaaaaaaaaaaaaaaaaaaaaaaaaaaaaaaaaaaaaaaaaaaaaaaaa |
| | | aAAAAGAAGAGCAAGCTT |
| FCoV S-2P2CD-HA; | 645 | MILLLTLLAVVRSEDAAKNVFVPIDGKIPESFSFSNWFLLTDKSTLVQGRV |
| Protein Sequence | | LSKQPVFVQCLRPVPTSSNVTAVVHFKNDVFCPNVTADVLRFNLNFSDSNY |
| | | TESNNTDQLYFTFEDNTTASIACYSSANVTDFQPANNSVSHIPFGKTTHSY |
| | | FCFANFSHSVVSRQFLGILPPTVREFAFGRDGSIFVNGYKYFSLPPIKSVN |
| | | FSITPVSNNTFWTIAYTNYTDVMVDVNGTGITRLFYCDSPLNRIKCRQLKH |
| | | ELPDGFYSASMLVKKDLPKTFVTMPQFYNWMNVTLHVVLNDTEKKADIILA |
| | | KAPELASLADIHFEIAQANGSVTNVTSLCVQTRQLALFYKYTSLQGLYTYS |
| | | NLVELQNYDCPFSPQKFNNYLQFETLCFDVNPAVAGCKWSLVHDVKWRTQF |
| | | ATITVSYKDGAMITTMPKAQLGFQDISNLVKDECTDYNIYGFQGTGIIRNT |
| | | TSRLVAGLYYTSASGDLLAFKNSTTGEIFTVVPCDLTAQAAVINDEIVGAI |
| | | TAVNQTDLFEFVGGNGSVTTYTMPQFYYITKWNNDTSTNCTSVITYSSFAI |
| | | CNTGEIKYVNVTHVEIVDDSIGVIKPISTGNITIPKNFTVAVQAEYIQIQV |
| | | KPVVVDCAKYVCNGNRHCLSLLTQYTSACQTIENALNLGARLESLMLNDMI |
| | | TVSDRSLELATVEKFNTTVLGGEKLGGFYFDGLSSLLPPTIGKRSAVEDLL |
| | | FNKVVTSGLGTVDDDYKKCSAGTDVADLVCAQYYNGIMVLPGVVDDNKMAM |
| | | YTASLIGGMAMGSITSAVAVPFAMQVQARLNYVALQTDVLQENQKILANAF |
| | | NNAIGNITLALGKVSNAITTISDGFNTMASALTKIQSVVNQQGEALSQLIS |
| | | QLQKNFQAISSSIAEIYNRLDPPEADAQVDRLITGRLAALNAYVSQTLTQY |
| | | AEVKASRQLAMEKVNECVKSQSDRYGFCGNGTHLFSLVNSAPDGLLFFHTV |
| | | LLPTEWEEVTAWSGICVNDTYAYVLKDFEYSIFSYNNTYMVTPRNMFQPRK |
| | | PQMSDFVQITSCEVTFLNTTYTTFQEIVIDYIDINKTIADMLEQYNPNYTT |
| | | PELDLQLEIFNQTKLNLTAEIDQLEQRADNLTTIAHELQQYIDNLNKTLVD |
| | | LEWLNRIETYVKWPWYVWLLIGLVVVFCIPLLLFCCLSTGCCGCFGCLGSC |
| | | CHSLCSRRQFESYEPIEKVHIHDIYPYDVPDYA* |
| FCoV S-2P2CD-HA; | 646 | GAATTCGGCTTTAATACGACTCACTATAAGGACATTAGCTTCTGACACAAC |
| DNA Sequence | | TGTGTTCACTAGCAACCTCAAACAGCCACCATGATTCTGCTGCTGACTCTG |
| | | TTAGCAGTGGTCAGAAGTGAGGATGCTGCTAAGAATGTGTTTGTCCCTATA |
| | | GATGGCAAGATCCCAGAATCCTTCAGCTTCTCGAACTGGTTCCTGTTGACC |
| | | GACAAGAGCACTTTGGTCCAGGGACGCGTGCTGAGCAAACAACCAGTCTTC |
| | | GTCCAGTGCCTCCGCCCAGTGCCAACAAGCAGCAACGTCACAGCGGTTGTG |
| | | CACTTTAAAAATGATGTCTTCSGTCCAAATGTTACCGCTGATGTGCTTAGA |
| | | TTCAATCTCAACTTTTCTGATTCCAATTACACAGAATCCAACAACACGGAC |
| | | CAGCTCTACTTCACTTTCGAGGACAACACAACCGCTAGTATCGCCTGCTAC |
| | | TCCTCAGCGAATGTTACCGATTTCCAACCAGCCAACAATAGCGTGAGTCAC |
| | | ATCCCTTTTGGGAAGACAACCCACAGCTACTTCTGCTTCGCAAATTTCAGT |
| | | CATTCTGTCGTTAGCCGGCAATTCTTGGGGATCCTGCCGCCTACCGTGCGG |
| | | GAGTTTGCCTTCGGACGGGACGGCTCGATCTTTGTCAACGGCTACAAGTAT |
| | | TTTAGTCTCCCGCCGATCAAASCGGTGAACTTCTCAATTACACCTGTCTCC |
| | | AATAATACCTTCTGGACAATTGCATACACAAATTACACAGATGTGATGGTG |
| | | GATGTTAACGGGACAGGAATTACCAGGCTGTTCTACTGTGACAGTCCTTTG |
| | | AACAGGATAAAGTGCAGGCAGTTGAAGCATGAACTGCCAGATGGGTTCTAT |
| | | TCTGCTTCCATGCTGGTCAAGAAAGATCTCCCAAAAACGTTCGTGACAATG |
| | | CCTCAATTCTACAACTGGATGAACGTAACCCTGCACGTCGTACTAAATGAT |
| | | ACCGAGAAGAAGGCTGATATCATCCTCGCAAAGGCTCCAGAGCTGGCTTCC |
| | | CTGGCAGATATTCACTTCGAGATTGCACAGGCCAATGGCTCTGTGACGAAT |
| | | GTTACCTCGCTGTGTGTGCAGACGAGGCAGCTGGCCCTCTTCTATAAGTAT |
| | | ACCAGCCTGCAAGGCCTGTATACGTATAGTAATTTGGTGGAATTGCAGAAT |
| | | TATGACTGCCCCTTTTCTCCACAGAAATTTAATAACTACCTGCAATTTGAG |
| | | ACCCTCTGCTTTGATGTAAACCCTGCAGTCGCCGGGTGTAAGTGGTCACTG |
| | | GTGCATGACGTTAAGTGGAGAACCCAGTTTGCTACGATAACAGTGTCGTAC |
| | | AAAGACGGAGCTATGATAACTACTATGCCCAAAGCCCAGCTTGGCTTCCAG |
| | | GACATTTCGAACCTTGTGAAGGATGAATGTACCGACTATAATATCTATGGA |
| | | TTCCAGGGGACAGGCATCATCCGGAACACCACCTCCCGACTGGTGGCCGGC |
| | | TTGTATTACACTTCTGCATCTGGCGATTTGCTAGCCTTTAAGAACTCCACT |
| | | ACTGGGGAGATCTTCACCGTCGTTCCCTGTGATCTGACAGCTCAGGCCGCA |
| | | GTTATTAATGATGAGATTGTCGGTGCCATTACCGCCGTGAACCAGACTGAT |
| | | CTCTTTGAATTTGTGGGCGGTAATGGATCAGTGACTACATACACCATGCCT |
| | | CAGTTTTATTATATCACCAAGTGGAACAATGACACTTCAACCAACTGCACC |
| | | TCTGTCATTACATACTCCAGCTTTGCTATCTGCAACACAGGAGAAATCAAG |
| | | TACGTCAATGTAACCCATGTGGAGATCGTCGATGATTCAATCGGAGTCATT |
| | | AAACCTATATCAACTGGAAACATCACAATCCCCAAGAATTTTACTGTCGCA |
| | | GTGCAAGCAGAGTACATTCAGATCCAGGTCAAGCCTGTAGTGGTGGACTGT |
| | | GCCAAATATGTTTGCAATGGAAATAGGCACTGCCTGTCCCTGCTCACTCAG |
| | | TATACTTCAGCCTGTCAAACTATTGAGAATGCACTCAACCTCGGGGCCCGT |
| | | CTTGAGTCACTGATGTTGAATGATATGATCACCGTGTCTGACCGGTCTTTG |
| | | GAACTTGCAACGGTGGAGAAGTTCAACACCACAGTACTTGGAGGAGAAAAA |
| | | CTCGGTGGCTTCTACTTTGACGGGCTGAGTTCTCTATTGCCTCCAACCATC |
| | | GGAAAGAGGAGCGCTGTGGAAGACCTGTTATTCAATAAAGTTGTTACATCT |
| | | GGTCTGGGCACCGTGGACGATGACTACAAAAAATGTTCCGCAGGCACTGAT |
| | | GTCGCTGACCTGGTGTGCGCCCAGTACTATAATGGTATCATGGTTTTACCC |
| | | GGTGTGGTTGACGATAATAAGATGGCCATGTATACGGCCAGCCTGATAGGC |
| | | GGCATGGCAATGGGCTCCATCACGTCAGCCGTTGCGGTGCCCTTCGCCATG |
| | | CAGGTGCAAGCGCGTCTAAACTACGTGGCGCTTCAGACCGACGTGCTGCAG |
| | | GAAAATCAAAAGATACTAGCCAACGCGTTCAACAATGCTATCGGGAATATT |
| | | ACTCTTGCCTTGGGGAAAGTGAGTAATGCCATCACTACCATCTCTGATGGC |
| | | TTCAACACCATGGCTAGTGCCCTCACCAAGATACAGTCCGTAGTGAATCAG |
| | | CAGGGTGAGGCTCTTAGCCAGTTGATCTCCCAGCTGCAGAAGAACTTTCAA |
| | | GCAATTTCTTCTTCCATAGCTGAAATTTACAACCGCCTGGACCCACCGGAG |
| | | GCCGATGCCCAGGTAGATAGGCTGATTACAGGGCGTCTCGCCGCTCTTAAT |
| | | GCCTATGTCAGCCAGACCTTGACACAGTACGCAGAGGTTAAAGCAAGTCGG |
| | | CAGTTAGCGATGGAGAAAGTTAATGAGTGCGTGAAATCCCAATCCGACCGG |
| | | TATGGCTTTTGTGGCAATGGAACACACCTGTTTTCGTTGGTGAACAGCGCT |
| | | CCTGACGGTCTCCTATTCTTCCACACCGTGTTGCTGCCCACAGAATGGGAG |
| | | GAGGTGACAGCCTGGAGCGGGATTTGTGTCAACGACACCTATGCCTACGTT |
| | | CTCAAAGACTTTGAATACAGCATTTTTAGTTACAATAACACGTACATGGTC |
| | | ACACCCAGAAACATGTTTCAGCCCCGAAAGCCCCAGATGAGCGATTTTGTT |
| | | CAGATAACCTCGTGTGAAGTGACCTTTCTGAATACTACTTACACCACGTTT |
| | | CAGGAGATCGTCATTGACTATATTGACATAAACAAGACTATTGCTGACATG |
| | | CTTGAACAGTACAACCCAAACTATACTACTCCTGAGTTGGACCTTCAGCTG |
| | | GAGATCTTTAACCAAACAAAACTGAACCTGACTGCAGAAATAGATCAGCTC |
| | | GAGCAGAGAGCCGATAACCTAACAACCATAGCTCATGAGCTCCAGCAATAC |
| | | ATCGACAATCTGAACAAGACTCTTGTAGACCTGGAATGGTTGAACAGAATC |
| | | GAAACATACGTAAAATGGCCCTGGTATGTGTGGCTCCTCATCGGCCTCGTC |
| | | GTAGTGTTCTGCATCCCCCTGTTGCTTTTTTGTTGCCTGTCTACTGGTTGC |
| | | TGTGGTTGTTTTGGATGTCTCGGCAGCTGCTGCCACTCCCTGTGCAGCAGA |
| | | CGCCAGTTCGAGAGCTATGAACCCATCGAGAAGGTTCATATTCATGATATC |
| | | TACCCATACGACGIACCAGATTACGCTTGACGTACGGCTGGAGCCTCGGTG |
| | | GCCTAGCTICTTGCCCCTTGGGCCTCCCCCCAGCCCCTCCTCCCCTTCCTG |
| | | CACCCGTACCCCCGTGGTCTTIGAATAAAGTCTGAGTGGGCGGCAaaaaaa |
| | | aaaaaaaaaaaaaaaaaaaaaaagcatatgactaaaaaaaaaaaaaaaaaa |
| | | aaaaaaaaaaaaaaaaaaaaaaaaaaaaaaaaaaaaaaaaaaaaaaaaaaa |
| | | aAAAAGAAGAGCAAGCTT |
| FCoV II-RBD-MN; | 647 | MILLILALLSTARSEDATHTAVNITIDLGMKRSGYGQPIASTLSNITLPMQ |
| Protein Sequence | | DNNTDVYCIRSNQFSVYVHSTCKSSLWDNIFNQDCTDVLEATAVIKTGTCP |
| | | FSFDKLNNYLTFNKFCLSLSPVGANCKFDVAARTRTNEQVVRSLYVIYEEG |
| | | DNIVGVPSDNSGGSGGSGGSGGSGGSGYIPEAPRDGQAYVRKDGEWVLLST |
| | | FLATNFSLLKQAGDVEENPGPKYILLILACIIACVYGERYCAMQGASTSCI |
| | | NGTENSCQTCFERGDLIWHLANWNFSWSVILIVFITVLQYGRPQFSWLVYG |
| | | IKMLIMWLLWPIVLALTIFNAYSEYQVSRYVMFGFSVAGAVVTFALWMMYF |
| | | VRSIQLYRRTKSWWSFNPETNAILCVNALGRSYVLPLDGTPTGVTLTLLSG |
| | | NLYAEGFKMAGGLTIEHLPKYVMIATPSRTIVYTLVGKQLKATTATGWAYY |
| | | VKSKAGDYSTEARTDNLSEHEKLLHMVATNFSLLKQAGDVEENPGPMATQG |
| | | QRVNWGDEPSKRRGRSNSRGRKNNDIPLSFYNPITLESGSKFWNVCPRDFV |
| | | PKGTGNKDQQTGYWNRQERYRTVKGQRKELPERWFFYFLGTGPHADAKFKD |
| | | KIDGVFWVARDGAMNKPTTLGTRGTNNESKPLKFDGKIPPQFQLEVNRSRN |
| | | NSRSGSQSRSVSRNRSQSRGRQQSNNQNNNVEDTIVAVLQKLGVTDKQRSR |
| | | SKSRDRSDSKSRDTTPKNANKHTWKKTAGKGDVTNFYGARSASANFGDSDL |
| | | VANGNAAKCYPQIAECVPSVSSMLFGSQWSAFEAGDQVKVTLTHTYYLPKD |
| | | DAKTSQFLEQIDAYKRPSQVAKDQRQRKSRSKSADKKPEELSVILVEAYTD |
| | | VFDDTQVEMIDEVTN* |
| FCoV II-RBD-MN; | 648 | GAATTCGGCTTTAATACGACTCACTATAAGGACATTAGCTTCTGACACAAC |
| DNA Sequence | | TGTGTTCACTAGCAACCTCAAACAGCCACCatgatactgttaatattagcg |
| | | cttcttagtaccgctaggtctgaagatgctACGCACACAGCTGTGAATATC |
| | | ACCATCGACCTAGGAATGAAGCGTAGTGGCTATGGGCAGCCCATTGCATCT |
| | | ACACTGAGCAACATAACGTTGCCAATGCAAGACAATAACACAGACGTTTAT |
| | | TGCATCAGATCTAACCAGTTCTCAGTGTATGTGCATTCAACCTGTAAATCT |
| | | TCCCTGTGGGACAATATATTCAATCAGGACTGCACCGATGTTCTGGAAGCC |
| | | ACAGCCGTCATCAAAACAGGAACCTGCCCATTTTCGTTTGACAAACTGAAT |
| | | AACTACCTGACCTTTAATAAGTTCTGTCTCAGTCTgTCGCCGGTAGGAGCT |
| | | AACTGCAAATTCGACGTGGCAGCGAGAACAAGAACTAATGAACAGGTGGTG |
| | | CGGAGCCTGTATGTTATTTATGAAGAGGGGGATAACATCGTAGGGGTCCCT |
| | | AGTGATAATAGCGGAGGCTCGGGCGGGTCTGGTGGGTCTGGGGGTTCAGGG |
| | | GGCTCCGGCTACATCCCTGAAGCTCCGAGAGACGGCCAGGCCTACGTCAGA |
| | | AAAGATGGAGAGTGGGTGCTCCTATCCACCTTCCTGGCTACTAACTTCAGC |
| | | CTGCTGAAGCAGGCTGGAGACGTGGAGGAGAACCCTGGACCTAAGTACATT |
| | | CTCCTgATACTGGCCTGCATCATCGCGTGTGTGTACGGAGAACGCTACTGT |
| | | GCAATGCAGGGAGCATCAACTAGCTGTATCAACGGCACAGAGAACAGCTGC |
| | | CAGACCTGTTTCGAAAGAGGAGACCTCATTTGGCACCTGGCCAACTGGAAT |
| | | TTCAGTTGGTCCGTAATCCTCATAGTCTTCATCACCGTGCTTCAGTATGGA |
| | | AGACCACAGTTCTCCTGGCTgGTTTATGGTATCAAGATGCTGATTATGTGG |
| | | CTGCTCTGGCCCATCGTGCTGGCACTCACCATCTTCAACGCCTATTCCGAG |
| | | TACCAGGTATCCCGGTACGTGATGTTTGGGTTTTCAGTGGCGGGAGCGGTT |
| | | GTCACTTTTGCCCTGTGGATGATGTACTTTGTGCGCAGTATACAGCTCTAC |
| | | AGGAGGACCAAATCTTGGTGGTCATTTAACCCTGAGACGAACGCTATCCTC |
| | | TGCGTGAATGCCCTTGGCAGGTCCTACGTTCTCCCCCTGGACGGTACACCC |
| | | ACTGGAGTCACACTGACTTTGCTCTCCGGCAACTTGTATGCAGAAGGCTTC |
| | | AAAATGGCAGGCGGCCTCACCATAGAGCACTTACCGAAATATGTCATGATT |
| | | GCCACACCTAGCAGGACAATTGTCTACACCTTAGTGGGTAAGCAGCTGAAG |
| | | GCCACGACAGCTACAGGCTGGGCCTACTATGTGAAATCCAAAGCTGGAGAC |
| | | TACAGCACTGAGGCGCGGACTGACAACCTATCTGAACATGAGAAGCTGCTG |
| | | CACATGGTGGCTACTAACTTCAGCCTGCTGAAGCAGGCTGGAGACGTGGAG |
| | | GAGAACCCTGGACCTATGGCCACCCAAGGACAGAGAGTAAACTGGGGCGAT |
| | | GAACCATCCAAACGGAGGGGCCGGTCCAATAGTCGAGGCCGCAAGAACAAT |
| | | GATATTCCGCTGAGCTTCTACAACCCCATAACATTGGAATCAGGAAGCAAG |
| | | TTTTGGAACGTCTGTCCCAGAGATTTTGTCCCAAAGGGCATTGGCAACAAG |
| | | GACCAGCAAATTGGCTACTGGAATAGGCAGGAGAGATACCGCATCGTGAAG |
| | | GGGCAAAGAAAGGAACTGCCAGAGCGCTGGTTCTTCTATTTCCTTGGTACG |
| | | GGCCCACATGCTGATGCCAAATTCAAGGATAAGATCGACGGCGTGTTCTGG |
| | | GTTGCACGGGATGGAGCTATGAACAAACCTACCACACTGGGGACAAGGGGC |
| | | ACCAACAATGAGTCCAAGCCTCTGAAGTTTGATGGGAAAATTCCTCCCCAG |
| | | TTCCAGCTGGAGGTCAACCGAAGCAGGAATAATTCCAGATCTGGGTCCCAA |
| | | TCACGATCTGTAAGTAGGAACCGCTCTCAATCACGGGGGGGGCAGCAGAGC |
| | | AACAACCAGAACAATAATGTGGAGGATACAATTGTTGCAGTCCTGCAGAAG |
| | | CTAGGAGTAACAGATAAACAACGTTCCCGCTCAAAGTCCAGGGACCGGTCG |
| | | GATTCTAAGAGCCGAGACACTACCCCCAAGAATGCAAATAAACACACCTGG |
| | | AAGAAAACTGCAGGCAAGGGTGATGTCACTAACTTCTATGGAGCCCGTAGT |
| | | GCCTCTGCCAATTTcGGGGACTCAGACCTGGTGGCTAATGGAAATGCTGCT |
| | | AAGTGCTACCCTCAGATTGCTGAATGTGTGCCTAGTGTTAGCTCGATGCTg |
| | | TTCGGATCGCAGTGGAGCGCAGAGGAGGCAGGGGATCAAGTGAAAGTAACT |
| | | CTGACTCATACTTACTATCTGCCCAAAGATGATGCTAAGACCTCCCAATTC |
| | | CTGGAGCAGATCGATGCATACAAGCGACCTTCTCAAGTCGCTAAAGATCAG |
| | | CGACAGAGGAAATCTCGCTCCAAGTCAGCTGACAAGAAGCCAGAAGAACTG |
| | | AGCGTGACTCTAGTTGAGGCCTATACTGATGTCTTTGATGACACCCAGGTG |
| | | GAGATGATTGATGAGGTGACCAACTGATAACGTACGGCTGGAGCCTCGGTG |
| | | GCCTAGCTTCTTGCCCCTTGGGCCTCCCCCCAGCCCCTCCTCCCCTTCCTG |
| | | CACCCGTACCCCCGTGGTCTTTGAATAAAGTCTGAGTGGGCGGCAaaaaaa |
| | | aaaaaaaaaaaaaaaaaaaaaaagcatatgactaaaaaaaaaaaaaaaaaa |
| | | aaaaaaaaaaaaaaaaaaaaaaaaaaaaaaaaaaaaaaaaaaaaaaaaaaa |
| | | aAAAAGAAGAGCAAGCTT |

TABLE 5
list of T cell epitopes in the constructs

| | | |
|---|---|---|
| FCoV; T cell | 542 | IDGVFWVAK |
| Epitope sequences | 543 | VIFLVLLGF |
| | 544 | GLFLNTLSF |
| | 545 | VYSIKMLIM |
| | 546 | YMFVNDLTL |
| | 547 | IVLPARHAY |
| | 548 | SHGSIYVTL |
| | 549 | FIYLAYFWY |
| | 550 | WILKSRLIL |
| | 551 | QYGRPQFSW |
| | 552 | AYAKLQLDI |
| | 553 | TPTGITLTL |
| | 554 | EHPVLTWEL |
| | 555 | PMLIAFGYY |
| | 556 | LIGPMLIAF |
| | 557 | ILACIIACV |
| | 558 | VVLLVCVFL |
| | 559 | ELNSIAFAV |
| | 560 | VVSANIKSF |
| | 561 | TDNLSEHEK |
| | 562 | LFLNTLSFI |
| | 563 | TPRNANKHT |
| | 564 | GKLLVCIGF |
| | 565 | PEELSVTLV |
| | 566 | LFVLFLALY |
| | 567 | LVLLGFSCY |
| | 568 | YQVSRYVMF |
| | 569 | GFSVAGAVL |
| | 570 | GVPDSSLRV |
| | 571 | LLIIVLILF |
| | 572 | FVHDRAAPF |
| | 573 | MLIAFGYYI |
| | 574 | VVLRVIFLV |
| | 575 | YIFSQEAVV |
| | 576 | VLLGFSCYT |
| | 577 | AFAVTLKVL |
| | 578 | LYRRTKSWW |
| | 579 | KVCVGVLMF |
| | 580 | FILYNTTTL |
| | 581 | IALLNVIKL |
| | 582 | YMFVNDLTL |
| | 583 | TLVEAYTDV |
| | 584 | VLAETRLLV |
| | 585 | PIVLALTIF |
| | 586 | MPNFSWILK |
| | 587 | AYFWYVNSR |
| | 588 | KSRERADSK |
| | 589 | VTLYGGINY |
| | 590 | YVMIATPSR |
| | 591 | IYVTLYGGI |
| | 592 | MFPRAFTII |
| | 593 | FWNVCPRDF |
| | 594 | VYDFCAKNW |
| | 595 | FALWMMYFV |
| | 596 | FEFILYNTT |
| | 597 | VEDTIVAVL |
| | 598 | RPQFSWLVY |
| | 599 | TFALWMMYF |
| | 600 | AMQQTGMQC |
| | 601 | VTEQSSRSK |
| | 602 | VYGERYCAM |

[0826] Unless defined otherwise, all technical and scientific terms used herein have the same meanings as commonly understood by one of skill in the art to which the disclosed invention belongs. Publications cited herein and the materials for which they are cited are specifically incorporated by reference.

[0827] Those skilled in the art will appreciate that numerous changes and modifications can be made to the preferred embodiments of the invention and that such changes and modifications can be made without departing from the spirit of the invention. It is, therefore, intended that the appended claims cover all such equivalent variations as fall within the true spirit and scope of the invention.

The application's sequence listing, which the Patent Office published only in electronic form, follows.

SEQUENCE LISTING (649 sequences)

SEQ ID NO: 1 - DNA, 1620 bp, Human metapneumovirus
  source 1..1620: mol_type = genomic DNA
atgagctggaaggtggtgattatcttcagcctgctgattacacctcaacacggcctgaaggagagctacctggaagagagctgctccaccatcaccgagggctacctgagcgtgctgcggaccggctggtacaccaacgtgttcaccctggaggtgggcgacgtggagaacctgacctgcagcgacggccctagcctgatcaagaccgagctggacctgaccaagagcgctctgagagagctgaagaccgtgtccgccgaccagctggccagagaggaacagatcgagaaccctcggcagagcagattcgtgctgggcgccatcgctctgggagtcgccgctgccgctgcagtgacagctggagtggccattgctaagaccatcagactggaaagcgaggtgacagccatcaacaatgccctgaagaagaccaacgaggccgtgagcaccctgggcaatggagtgagagtgctggccacagccgtgcgggagctgaaggacttcgtgagcaagaacctgaccagagccatcaacaagaacaagtgcgacatcgatgacctgaagatggccgtgagcttctcccagttcaacagacggttcctgaacgtggtgagacagttctccgacaacgctggaatcacacctgccattagcctggacctgatgaccgacgccgagctggctagagccgtgcccaacatgcccaccagcgctggccagatcaagctgatgctggagaacagagccatggtgcggagaaagggcttcggcatcctgattggggtgtatggaagctccgtgatctacatggtgcagctgcccatcttcggcgtgatcgacacaccctgctggatcgtgaaggccgctcctagctgctccgagaagaaaggaaactatgcctgtctgctgagagaggaccagggctggtactgccagaacgccggaagcacagtgtactatcccaacgagaaggactgcgagaccagaggcgaccacgtgttctgcgacaccgctgccggaatcaacgtggccgagcagagcaaggagtgcaacatcaacatcagcacaaccaactacccctgcaaggtgagcaccggacggcaccccatcagcatggtggctctgagccctctgggcgctctggtggcctgctataagggcgtgtcctgtagcatcggcagcaatcgggtgggcatcatcaagcagctgaacaagggatgctcctacatcaccaaccaggacgccgacaccgtgaccatcgacaacaccgtgtaccagctgagcaaggtggagggcgagcagcacgtgatcaagggcagacccgtgagctccagcttcgaccccatcaagttccctgaggaccagttcaacgtggccctggaccaggtgtttgagaacatcgagaacagccaggccctggtggaccagagcaacagaatcctgtccagcgctgagaagggcaacaccggcttcatcattgtgatcattctgatcgccgtgctgggcagctccatgatcctggtgagcatcttcatcattatcaagaagaccaagaaacccaccggagcccctcctgagctgagcggcgtgaccaacaatggcttcattccccacaactga

SEQ ID NO: 2 - DNA, 1620 bp, Human metapneumovirus
  source 1..1620: mol_type = genomic DNA
atgtcttggaaagtgatgatcatcatttcgttactcataacaccccagcacgggctaaaggagagttatttggaagaatcatgtagtactataactgagggatacctcagtgttttaagaacaggctggtacactaatgtcttcacattagaagttggtgatgttgaaaatcttacatgtactgatggacctagcttaatcaaaacagaacttgatctaacaaaaagtgctttaagggaactcaaaacagtctctgctgatcagttggcgagagaggagcaaattgaaaatcccagacaatcaagatttgtcttaggtgcgatagctctcggagttgctacagcagcagcagtcacagcaggcattgcaatagccaaaaccataaggcttgagagtgaggtgaatgcaattaaaggtgctctcaaacaaactaatgaagcagtatccacattagggaatggtgtgcgggtcctagccactgcagtgagagagctaaaagaatttgtgagcaaaaacctgactagtgcaatcaacaggaacaaatgtgacattgctgatctgaagatggctgtcagcttcagtcaattcaacagaagatttctaaatgttgtgcggcagttttcagacaatgcagggataacaccagcaatatcattggacctgatgactgatgctgagttggccagagctgtatcatacatgccaacatctgcagggcagataaaactgatgttggagaaccgcgcaatggtaaggagaaaaggatttggaatcctgataggggtctacggaagctctgtgatttacatggttcaattgccgatctttggtgtcatagatacaccttgttggatcatcaaggcagctccctcttgctcagaaaaaaacgggaattatgcttgcctcctaagagaggatcaagggtggtattgtaaaaatgcaggatctactgtttactacccaaatgaaaaagactgcgaaacaagaggtgatcatgttttttgtgacacagcagcagggatcaatgttgctgagcaatcaagagaatgcaacatcaacatatctactaccaactacccatgcaaagtcagcacaggaagacaccctataagcatggttgcactatcacctctcggtgctttggtggcttgctataaaggggtaagctgctcgattggcagcaattgggttggaatcatcaaacaattacccaaaggctgctcatacataaccaaccaggatgcagacactgtaacaattgacaataccgtgtatcaactaagcaaagttgaaggtgaacagcatgtaataaaagggagaccagtttcaagcagttttgatccaatcaagtttcctgaggatcagttcaatgttgcgcttgatcaagtcttcgaaagcattgagaacagtcaggcactagtggaccagtcaaacaaaattctaaacagtgcagaaaaaggaaacactggtttcattatcgtagtaattttggttgctgttcttggtctaaccatgatttcagtgagcatcatcatcataatcaagaaaacaaggaagcccacaggagcacctccagagctgaatggtgtcaccaacggcggtttcataccacatagttag

SEQ ID NO: 3 - DNA, 1620 bp, Human metapneumovirus
  source 1..1620: mol_type = genomic DNA
atgtcttggaaagtgatgattatcatttcgttactcataacacctcagcatggactaaaagaaagttatttagaagaatcatgtagtactataactgaaggatatctcagtgttttaagaacaggttggtacaccaatgtctttacattagaagttggtgatgttgaaaatcttacatgtactgatggacctagcttaatcaaaacagaacttgacctaaccaaaagtgctttaagagaactcaaaacagtttctgctgatcagttagcgagagaagaacaaattgaaaatcccagacaatcaaggtttgtcctaggtgcaatagctcttggagttgccacagcagcagcagtcacagcaggcattgcaatagccaaaactataaggcttgagagtgaagtgaatgcaatcaaaggtgctctcaaaacaaccaatgaggcagtatcaacactaggaaatggagtgcgggtcctagccactgcagtaagagagctgaaagaatttgtgagcaaaaacctgactagtgcgatcaacaagaacaagtgtgacattgctgatttgaagatggctgtcagcttcagtcagttcaacagaagattcctaaatgttgtgcggcagttttcagacaatgcagggataacaccagcaatatcattggacctgatgaatgatgctgagctggccagagctgtatcatacatgccaacatctgcaggacagataaaactaatgttagagaaccgtgcaatggtgaggagaaaaggatttggaatcttgataggggtctacggaagctctgtgatttacatggtccagctgccgatctttggtgtcataaatacaccttgttggataatcaaggcagctccctcttgttcagaaaaagatggaaattatgcttgcctcctaagagaggatcaagggtggtattgtaaaaatgcaggatccactgtttactacccaaatgaaaaagactgcgaaacaagaggtgatcatgttttttgtgacacagcagcagggatcaatgttgctgagcaatcaagagaatgcaacatcaacatatctaccaccaactacccatgcaaagtcagcacaggaagacaccctatcagcatggttgcactatcacctctcggtgctttggtagcttgctacaaaggggttagctgctcgactggcagtaatcaggttggaataatcaaacaactacctaaaggctgctcatacataactaaccaggacgcagacactgtaacaattgacaacactgtgtatcaactaagcaaagttgagggtgaacagcatgtaataaaagggagaccagtttcaagcagttttgatccaatcaggtttcctgaggatcagttcaatgttgcgcttgatcaagtctttgaaagcattgaaaacagtcaagcactagtggaccagtcaaacaaaattctgaacagtgcagaaaaaggaaacactggtttcattattgtaataattttgattgctgttcttgggttaaccatgatttcagtgagcatcatcatcataatcaaaaaaacaaggaagcccacaggggcacctccggagctgaatggtgttaccaacggcggtttcataccgcatagttag

SEQ ID NO: 4 - DNA, 1725 bp, Human respiratory syncytial virus
  source 1..1725: mol_type = genomic DNA
atggagttgccaatcctcaaaacaaatgcaattaccacaatccttgctgcagtcacactctgtttcgcttccagtcaaaacatcactgaagaattttatcaatcaacatgcagtgcagttagcaaaggctatcttagtgctctaagaactggttggtatactagtgttataactatagaattaagtaatatcaaggaaaataagtgtaatggaacagatgctaaggtaaaattgataaaacaagaattagataaatataaaaatgctgtaacagaattgcagttgctcatgcaaagcacaccagcagccaacaatcgagccagaagagaactaccaaggtttatgaattatacactcaataataccaaaaataccaatgtaacattaagcaagaaaaggaaaagaagatttcttggctttttgttaggtgttggatctgcaatcgccagtggcattgctgtatctaaggtcctgcacctagaaggggaagtgaacaaaatcaaaagtgctctactatccacaaacaaggctgtagtcagcttatcaaatggagttagtgtcttaaccagcaaagtgttagacctcaaaaactatatagataaacagttgttacctattgtgaacaagcaaagctgcagcatatcaaacattgaaactgtgatagagttccaacaaaagaacaacagactactagagattaccagggaatttagtgttaatgcaggtgtaactacacctgtaagcacttatatgttaactaatagtgaattattatcattaatcaatgatatgcctataacaaatgatcagaaaaagttaatgtccaacaatgttcaaatagttagacagcaaagttactctatcatgtccataataaaggaggaagtcttagcatatgtagtacaattaccactatatggtgtaatagatacaccctgttggaaactgcacacatcccctctatgtacaaccaacacaaaggaagggtccaacatctgcttaacaagaaccgacagaggatggtattgtgacaatgcaggatcagtatctttcttcccacaagctgaaacatgtaaagttcaatcgaatcgggtattttgtgacacaatgaacagtttaacattaccaagtgaagtaaatctctgcaacattgacatattcaaccccaaatatgattgcaaaattatgacttcaaaaacagatgtaagcagctccgttatcacatctctaggagccattgtgtcatgctatggcaaaactaaatgtacagcatccaataaaaatcgtgggatcataaagacattttctaacgggtgtgattatgtatcaaataagggggtggatactgtgtctgtaggtaatacattatattatgtaaataagcaagaaggcaaaagtctctatgtaaaaggtgaaccaataataaatttctatgacccattagtgttcccctctgatgaatttgatgcatcaatatctcaagtcaatgagaagattaaccagagcctagcatttattcgtaaatccgatgaattattacataatgtaaatgctggtaaatccaccacaaatatcatgataactactataattatagtgattatagtaatattgttatcattaattgcagttggactgctcctatactgcaaggccagaagcacaccagtcacactaagtaaggatcaactgagtggtataaataatattgcatttagtaactga

SEQ ID NO: 5 - protein, 539 aa, Human metapneumovirus isolate
MSWKVVIIFSLLITPQHGLKESYLEESCSTITEGYLSVLRTGWYTNVFTLEVGDVENLTCSDGPSLIKTELDLTKSALRELKTVSADQLAREEQIENPRQSRFVLGAIALGVAAAAAVTAGVAIAKTIRLESEVTAINNALKKTNEAVSTLGNGVRVLATAVRELKDFVSKNLTRAINKNKCDIDDLKMAVSFSQFNRRFLNVVRQFSDNAGITPAISLDLMTDAELARAVPNMPTSAGQIKLMLENRAMVRRKGFGILIGVYGSSVIYMVQLPIFGVIDTPCWIVKAAPSCSEKKGNYACLLREDQGWYCQNAGSTVYYPNEKDCETRGDHVFCDTAAGINVAEQSKECNINISTTNYPCKVSTGRHPISMVALSPLGALVACYKGVSCSIGSNRVGIIKQLNKGCSYITNQDADTVTIDNTVYQLSKVEGEQHVIKGRPVSSSFDPIKFPEDQFNVALDQVFENIENSQALVDQSNRILSSAEKGNTGFIIVIILIAVLGSSMILVSIFIIIKKTKKPTGAPPELSGVTNNGFIPHN

SEQ ID NO: 6 - protein, 539 aa, Human metapneumovirus
MSWKVMIIISLLITPQHGLKESYLEESCSTITEGYLSVLRTGWYTNVFTLEVGDVENLTCTDGPSLIKTELDLTKSALRELKTVSADQLAREEQIENPRQSRFVLGAIALGVATAAAVTAGIAIAKTIRLESEVNAIKGALKQTNEAVSTLGNGVRVLATAVRELKEFVSKNLTSAINRNKCDIADLKMAVSFSQFNRRFLNVVRQFSDNAGITPAISLDLMTDAELARAVSYMPTSAGQIKLMLENRAMVRRKGFGILIGVYGSSVIYMVQLPIFGVIDTPCWIIKAAPSCSEKNGNYACLLREDQGWYCKNAGSTVYYPNEKDCETRGDHVFCDTAAGINVAEQSRECNINISTTNYPCKVSTGRHPISMVALSPLGALVACYKGVSCSIGSNWVGIIKQLPKGCSYITNQDADTVTIDNTVYQLSKVEGEQHVIKGRPVSSSFDPIKFPEDQFNVALDQVFESIENSQALVDQSNKILNSAEKGNTGFIIVVILVAVLGLTMISVSIIIIIKKTRKPTGAPPELNGVTNGGFIPHS

SEQ ID NO: 7 - protein, 539 aa, Human metapneumovirus
MSWKVMIIISLLITPQHGLKESYLEESCSTITEGYLSVLRTGWYTNVFTLEVGDVENLTCTDGPSLIKTELDLTKSALRELKTVSADQLAREEQIENPRQSRFVLGAIALGVATAAAVTAGIAIAKTIRLESEVNAIKGALKTTNEAVSTLGNGVRVLATAVRELKEFVSKNLTSAINKNKCDIADLKMAVSFSQFNRRFLNVVRQFSDNAGITPAISLDLMNDAELARAVSYMPTSAGQIKLMLENRAMVRRKGFGILIGVYGSSVIYMVQLPIFGVINTPCWIIKAAPSCSEKDGNYACLLREDQGWYCKNAGSTVYYPNEKDCETRGDHVFCDTAAGINVAEQSRECNINISTTNYPCKVSTGRHPISMVALSPLGALVACYKGVSCSTGSNQVGIIKQLPKGCSYITNQDADTVTIDNTVYQLSKVEGEQHVIKGRPVSSSFDPIRFPEDQFNVALDQVFESIENSQALVDQSNKILNSAEKGNTGFIIVIILIAVLGLTMISVSIIIIIKKTRKPTGAPPELNGVTNGGFIPHS

SEQ ID NO: 8 - protein, 574 aa, Human respiratory syncytial virus
MELPILKTNAITTILAAVTLCFASSQNITEEFYQSTCSAVSKGYLSALRTGWYTSVITIELSNIKENKCNGTDAKVKLIKQELDKYKNAVTELQLLMQSTPAANNRARRELPRFMNYTLNNTKNTNVTLSKKRKRRFLGFLLGVGSAIASGIAVSKVLHLEGEVNKIKSALLSTNKAVVSLSNGVSVLTSKVLDLKNYIDKQLLPIVNKQSCSISNIETVIEFQQKNNRLLEITREFSVNAGVTTPVSTYMLTNSELLSLINDMPITNDQKKLMSNNVQIVRQQSYSIMSIIKEEVLAYVVQLPLYGVIDTPCWKLHTSPLCTTNTKEGSNICLTRTDRGWYCDNAGSVSFFPQAETCKVQSNRVFCDTMNSLTLPSEVNLCNIDIFNPKYDCKIMTSKTDVSSSVITSLGAIVSCYGKTKCTASNKNRGIIKTFSNGCDYVSNKGVDTVSVGNTLYYVNKQEGKSLYVKGEPIINFYDPLVFPSDEFDASISQVNEKINQSLAFIRKSDELLHNVNAGKSTTNIMITTIIIVIIVILLSLIAVGLLLYCKARSTPVTLSKDQLSGINNIAFSN

SEQ ID NO: 9 - DNA, 1617 bp, Human parainfluenza virus 3
  source 1..1617: mol_type = genomic DNA
atgccaatttcaatactgttaattattacaaccatgatcatggcatcacactgccaaatagacatcacaaaactacagcatgtaggtgtattggtcaacagtcccaaagggatgaagatatcacaaaacttcgaaacaagatatctaatcctgagtctcataccaaaaatagaagattctaactcttgtggtgaccaacagatcaagcaatacaagaggttattggatagactgatcattcctttatatgatggactaagattacagaaggatgtgatagtgactaatcaagaatccaatgaaaacactgatcccagaacagaacgattctttggaggggtaattggaactattgctctaggagtagcaacctcagcacaaattacagcagcagttgctctggttgaagccaagcaggcaagatcagacattgaaaaactcaaggaagcaatcagggacacaaataaagcagtgcagtcagttcagagctctgtaggaaatttgatagtagcaattaaatcagtccaggattatgtcaacaaagaaatcgtgccatcgattgcgagactaggttgtgaagcagcaggacttcagttagggattgcattaacacagcattactcagaattaacaaatatatttggtgataacataggatcgttacaagaaaaaggaataaaattacaaggtatagcatcattataccgtacaaatatcacagaaatattcacaacatcaacagttgacaaatatgatatttatgatctattatttacagaatcaataaaggtgagagttatagatgttgatttgaatgattactcaataaccctccaagtcagactccctttattgaccagactgctgaacactcaaatctacaaagtagattccatatcatacaatatccaaaatagagaatggtatatccctcttcccagccatatcatgacgaaaggggcatttctaggtggagcagatgtcaaagaatgcatagaagcattcagcagttatatatgcccttctgatccaggatttgtactaaaccatgaaatggagagctgtctatcaggaaacatatcccaatgtccaagaaccacagtcacatcagacatagttcctaggtatgcatttgtcaatggaggagtggttgcgaattgtataacaactacatgtacatgcaatggtatcggtaatagaatcaaccaaccacctgatcaaggagtcaaaattataacacataaagaatgtaatacaataggtatcaacggaatgctattcaacacaaacaaagaaggaactcttgcattctacacaccagacgacataacattaaacaattctgttgcacttgatccgattgacatatcaatcgagctcaacaaggccaaatcagatcttgaggaatcaaaagaatggataagaaggtcaaatcaaaagctagattctattggaagttggcatcaatctagcactacaatcatagttattttgataatgatgattatattgtttataattaatataacaataattacaattgcaattaagtattacagaattcaaaagagaaatcgagtggatcaaaatgataagccgtatgtattaacaaacaag

SEQ ID NO: 10 - DNA, 1716 bp, Human parainfluenza virus 3
  source 1..1716: mol_type = genomic DNA
atggaatactggaagcacaccaaccacggaaaggatgctggtaatgagctggagacatccacagccactcatggcaacaagctcaccaacaagataacatatatattgtggacgataaccctggtgttattatcaatagtcttcatcatagtgctaactaattccatcaaaagtgaaaaggcccgcgaatcattgctacaagacataaataatgagtttatggaagttacagaaaagatccaagtggcatcggataatactaatgatctaatacagtcaggagtgaatacaaggcttcttacaattcagagtcatgtccagaattatataccaatatcattgacacaacaaatatcggatcttaggaaattcattagtgaaattacaattagaaatgataatcaagaagtgccaccacaaagaataacacatgatgtgggtataaaacctttaaatccagatgatttctggagatgcacgtctggtcttccatctttgatgaaaactccaaaaataagattaatgccgggaccaggattattagctatgccaacgactgttgatggctgtgtcagaaccccgtccttagtgataaatgatctgatttatgcttacacctcaaatctaattactcgaggttgccaggatatagggaaatcatatcaagtattacagatagggataataactgtaaactcagacttggtacctgacttaaatcctaggatctctcataccttcaacataaatgacaatagaaagtcatgttctctagcactcctaaatacagatgtatatcaactgtgttcaaccccaaaagttgatgaaagatcagattatgcatcatcaggcatagaagatattgtacttgatattgtcaattatgatggctcaatctcgacaacaagatttaagaataataatataagttttgatcaaccatatgcggcattatacccatctgttggaccagggatatactacaaaggcaaaataatatttctcgggtatggaggtcttgaacatccaataaatgagaatgcaatctgcaacacaactgggtgtcctgggaaaacacagagagactgtaatcaagcatctcatagtccatggttttcagatagaaggatggtcaactctataattgttgttgacaagggcttgaactcagttccaaaattgaaggtatggacgatatctatgagacaaaattactgggggtcagaaggaagattacttctactaggtaacaagatctacatatacacaagatctacaagttggcacagcaagttacaattaggaataattgacattactgactacagtgatataaggataaaatggacatggcataatgtgctatcaagaccaggaaacaatgaatgtccatggggacattcatgtccggatggatgtataacgggagtatataccgatgcatatccactcaatcccacaggaagcattgtatcatctgtcatattggactcacaaaaatcgagagtcaacccagtcataacttactcaacagcaaccgaaagggtaaacgagctggctatccgaaacaaaacactctcagctgggtacacaacaacaagctgcattacacactataacaaagggtattgttttcatatagtagaaataaatcataaaagcttaaacacatttcaacccatgttgttcaaaacagagattccaaaaagctgcagt

SEQ ID NO: 11 - DNA, 1716 bp, synthetic construct
  misc_feature 1..1716: note = Synthetic Polynucleotide
  source 1..1716: mol_type = other DNA
atggaatactggaagcacaccaaccacggcaaggacgccggcaacgagctggaaaccagcacagccacacacggcaacaagctgaccaacaagatcacctacatcctgtggaccatcaccctggtgctgctgagcatcgtgttcatcatcgtgctgaccaatagcatcaagagcgagaaggccagagagagcctgctgcaggacatcaacaacgagttcatggaagtgaccgagaagatccaggtggccagcgacaacaccaacgacctgatccagagcggcgtgaacacccggctgctgaccatccagagccacgtgcagaactacatccccatcagcctgacccagcagatcagcgacctgcggaagttcatcagcgagatcaccatccggaacgacaaccaggaagtgcccccccagagaatcacccacgacgtgggcatcaagcccctgaaccccgacgatttctggcggtgtacaagcggcctgcccagcctgatgaagacccccaagatccggctgatgcctggccctggactgctggccatgcctaccacagtggatggctgtgtgcggacccccagcctcgtgatcaacgatctgatctacgcctacaccagcaacctgatcacccggggctgccaggatatcggcaagagctaccaggtgctgcagatcggcatcatcaccgtgaactccgacctggtgcccgacctgaaccctcggatcagccacaccttcaacatcaacgacaacagaaagagctgcagcctggctctgctgaacaccgacgtgtaccagctgtgcagcacccccaaggtggacgagagaagcgactacgccagcagcggcatcgaggatatcgtgctggacatcgtgaactacgacggcagcatcagcaccacccggttcaagaacaacaacatcagcttcgaccagccctacgccgccctgtacccttctgtgggccctggcatctactacaagggcaagatcatcttcctgggctacggcggcctggaacaccccatcaacgagaacgccatctgcaacaccaccggctgccctggcaagacccagagagactgcaatcaggccagccacagcccctggttcagcgaccgcagaatggtcaactctatcatcgtggtggacaagggcctgaacagcgtgcccaagctgaaagtgtggacaatcagcatgcgccagaactactggggcagcgagggcagacttctgctgctgggaaacaagatctacatctacacccggtccaccagctggcacagcaaactgcagctgggaatcatcgacatcaccgactacagcgacatccggatcaagtggacctggcacaacgtgctgagcagacccggcaacaatgagtgcccttggggccacagctgccccgatggatgtatcaccggcgtgtacaccgacgcctaccccctgaatcctaccggctccatcgtgtccagcgtgatcctggacagccagaaaagcagagtgaaccccgtgatcacatacagcaccgccaccgagagagtgaacgaactggccatcagaaacaagaccctgagcgccggctacaccaccacaagctgcatcacacactacaacaagggctactgcttccacatcgtggaaatcaaccacaagtccctgaacaccttccagcccatgctgttcaagaccgagatccccaagagctgctcc

SEQ ID NO: 12 - DNA, 1617 bp, synthetic construct
  misc_feature 1..1617: note = Synthetic Polynucleotide
  source 1..1617: mol_type = other DNA
atgcccatcagcatcctgctgatcatcaccacaatgatcatggccagccactgccagatcgacatcaccaagctgcagcacgtgggcgtgctcgtgaacagccccaagggcatgaagatcagccagaacttcgagacacgctacctgatcctgagcctgatccccaagatcgaggacagcaacagctgcggcgaccagcagatcaagcagtacaagcggctgctggacagactgatcatccccctgtacgacggcctgcggctgcagaaagacgtgatcgtgaccaaccaggaaagcaacgagaacaccgacccccggaccgagagattcttcggcggcgtgatcggcacaatcgccctgggagtggccacaagcgcccagattacagccgctgtggccctggtggaagccaagcaggccagaagcgacatcgagaagctgaaagaggccatccgggacaccaacaaggccgtgcagagcgtgcagtccagcgtgggcaatctgatcgtggccatcaagtccgtgcaggactacgtgaacaaagaaatcgtgccctctatcgcccggctgggctgtgaagctgccggactgcagctgggcattgccctgacacagcactacagcgagctgaccaacatcttcggcgacaacatcggcagcctgcaggaaaagggcattaagctgcagggaatcgccagcctgtaccgcaccaacatcaccgagatcttcaccaccagcaccgtggataagtacgacatctacgacctgctgttcaccgagagcatcaaagtgcgcgtgatcgacgtggacctgaacgactacagcatcaccctgcaagtgcggctgcccctgctgaccagactgctgaacacccagatctacaaggtggacagcatctcctacaacatccagaaccgcgagtggtacatccctctgcccagccacattatgaccaagggcgcctttctgggcggagccgacgtgaaagagtgcatcgaggccttcagcagctacatctgccccagcgaccctggcttcgtgctgaaccacgagatggaaagctgcctgagcggcaacatcagccagtgccccagaaccaccgtgacctccgacatcgtgcccagatacgccttcgtgaatggcggcgtggtggccaactgcatcaccaccacctgtacctgcaacggcatcggcaaccggatcaaccagcctcccgatcagggcgtgaagattatcacccacaaagagtgtaacaccatcggcatcaacggcatgctgttcaataccaacaaagagggcaccctggccttctacacccccgacgatatcaccctgaacaactccgtggctctggaccccatcgacatctccatcgagctgaacaaggccaagagcgacctggaagagtccaaagagtggatccggcggagcaaccagaagctggactctatcggcagctggcaccagagcagcaccaccatcatcgtgatcctgattatgatgattatcctgttcatcatcaacattaccatcatcactatcgccattaagtactaccggatccagaaacggaaccgggtggaccagaatgacaagccctacgtgctgacaaacaag

SEQ ID NO: 13 - protein, 539 aa, Human parainfluenza virus 3
MPISILLIITTMIMASHCQIDITKLQHVGVLVNSPKGMKISQNFETRYLILSLIPKIEDSNSCGDQQIKQYKRLLDRLIIPLYDGLRLQKDVIVTNQESNENTDPRTERFFGGVIGTIALGVATSAQITAAVALVEAKQARSDIEKLKEAIRDTNKAVQSVQSSVGNLIVAIKSVQDYVNKEIVPSIARLGCEAAGLQLGIALTQHYSELTNIFGDNIGSLQEKGIKLQGIASLYRTNITEIFTTSTVDKYDIYDLLFTESIKVRVIDVDLNDYSITLQVRLPLLTRLLNTQIYKVDSISYNIQNREWYIPLPSHIMTKGAFLGGADVKECIEAFSSYICPSDPGFVLNHEMESCLSGNISQCPRTTVTSDIVPRYAFVNGGVVANCITTTCTCNGIGNRINQPPDQGVKIITHKECNTIGINGMLFNTNKEGTLAFYTPDDITLNNSVALDPIDISIELNKAKSDLEESKEWIRRSNQKLDSIGSWHQSSTTIIVILIMMIILFIINITIITIAIKYYRIQKRNRVDQNDKPYVLTNK

SEQ ID NO: 14 - protein, 572 aa, Human parainfluenza virus 3
MEYWKHTNHGKDAGNELETSTATHGNKLTNKITYILWTITLVLLSIVFIIVLTNSIKSEKARESLLQDINNEFMEVTEKIQVASDNTNDLIQSGVNTRLLTIQSHVQNYIPISLTQQISDLRKFISEITIRNDNQEVPPQRITHDVGIKPLNPDDFWRCTSGLPSLMKTPKIRLMPGPGLLAMPTTVDGCVRTPSLVINDLIYAYTSNLITRGCQDIGKSYQVLQIGIITVNSDLVPDLNPRISHTFNINDNRKSCSLALLNTDVYQLCSTPKVDERSDYASSGIEDIVLDIVNYDGSISTTRFKNNNISFDQPYAALYPSVGPGIYYKGKIIFLGYGGLEHPINENAICNTTGCPGKTQRDCNQASHSPWFSDRRMVNSIIVVDKGLNSVPKLKVWTISMRQNYWGSEGRLLLLGNKIYIYTRSTSWHSKLQLGIIDITDYSDIRIKWTWHNVLSRPGNNECPWGHSCPDGCITGVYTDAYPLNPTGSIVSSVILDSQKSRVNPVITYSTATERVNELAIRNKTLSAGYTTTSCITHYNKGYCFHIVEINHKSLNTFQPMLFKTEIPKSCS

SEQ ID NO: 15 - protein, 20 aa, synthetic construct
  REGION 1..20: note = Synthetic Polypeptide
METPAQLLFLLLLWLPDTTG

SEQ ID NO: 16 - protein, 18 aa, synthetic construct
  REGION 1..18: note = Synthetic Polypeptide
MDWTWILFLVAAATRVHS

SEQ ID NO: 17 - protein, 24 aa, synthetic construct
  REGION 1..24: note = Synthetic Polypeptide
MLGSNSGQRVVFTILLLLVAPAYS

SEQ ID NO: 18 - protein, 17 aa, synthetic construct
  REGION 1..17: note = Synthetic Polypeptide
MKCLLYLAFLFIGVNCA

SEQ ID NO: 19 - protein, 15 aa, synthetic construct
  REGION 1..15: note = Synthetic Polypeptide
MWLVSLAIVTACAGA

SEQ ID NO: 20 - DNA, 4062 bp, Middle East respiratory syndrome coronavirus
  source 1..4062: mol_type = genomic DNA
atgatacactcagtgtttctactgatgttcttgttaacacctacagaaagttacgttgatgtagggccagattctgttaagtctgcttgtattgaggttgatatacaacagaccttctttgataaaacttggcctaggccaattgatgtttctaaggctgacggtattatataccctcaaggccgtacatattctaacataactatcacttatcaaggtctttttccctatcagggagaccatggtgatatgtatgtttactctgcaggacatgctacaggcacaactccacaaaagttgtttgtagctaactattctcaggacgtcaaacagtttgctaatgggtttgtcgtccgtataggagcagctgccaattccactggcactgttattattagcccatctaccagcgctactatacgaaaaatttaccctgcttttatgctgggttcttcagttggtaatttctcagatggtaaaatgggccgcttcttcaatcatactctagttcttttgcccgatggatgtggcactttacttagagctttttattgtattctagagcctcgctctggaaatcattgtcctgctggcaattcctatacttcttttgccacttatcacactcctgcaacagattgttctgatggcaattacaatcgtaatgccagtctgaactcttttaaggagtattttaatttacgtaactgcacctttatgtacacttataacattaccgaagatgagattttagagtggtttggcattacacaaactgctcaaggtgttcacctcttctcatctcggtatgttgatttgtacggcggcaatatgtttcaatttgccaccttgcctgtttatgatactattaagtattattctatcattcctcacagtattcgttctatccaaagtgatagaaaagcttgggctgccttctacgtatataaacttcaaccgttaactttcctgttggatttttctgttgatggttatatacgcagagctatagactgtggttttaatgatttgtcacaactccactgctcatatgaatccttcgatgttgaatctggagtttattcagtttcgtctttcgaagcaaaaccttctggctcagttgtggaacaggctgaaggtgttgaatgtgatttttcacctcttctgtctggcacacctcctcaggtttataatttcaagcgtttggtttttaccaattgcaattataatcttaccaaattgctttcacttttttctgtgaatgattttacttgtagtcaaatatctccagcagcaattgctagcaactgttattcttcactgattttggattatttttcatacccacttagtatgaaatccgatctcagtgttagttctgctggtccaatatcccagtttaattataaacagtccttttctaatcccacatgtttgatcttagcgactgttcctcataaccttactactattactaagcctcttaagtacagctatattaacaagtgctctcgtcttctttctgatgatcgtactgaagtacctcagttagtgaacgctaatcaatactcaccctgtgtatccattgtcccatccactgtgtgggaagacggtgattattataggaaacaactatctccacttgaaggtggtggctggcttgttgctagtggctcaactgttgccatgactgagcaattacagatgggctttggtattacagttcaatatggtacagacaccaatagtgtttgccccaagcttgaatttgctaatgacacaaaaattgcctctcaattaggcaattgcgtggaatattccctctatggtgtttcgggccgtggtgtttttcagaattgcacagctgtaggtgttcgacagcagcgctttgtttatgatgcgtaccagaatttagttggctattattctgatgatggcaactactactgtctgcgtgcttgtgttagtgttcctgtttctgtcatctatgataaagaaactaaaacccacgctactctatttggtagtgttgcatgtgaacacatttcttctaccatgtctcaatactcccgttctacgcgatcaatgcttaaacggcgagattctacatatggcccccttcagacacctgttggttgtgtcctaggacttgttaattcctctttgttcgtagaggactgcaagttgcctctcggtcaatctctctgtgctcttcctgacacacctagtactctcacacctcgcagtgtgcgctctgtgccaggtgaaatgcgcttggcatccattgcttttaatcatcccattcaggttgatcaacttaatagtagttattttaaattaagtatacccactaatttttcctttggtgtgactcaggagtacattcagacaaccattcagaaagttactgttgattgtaaacagtacgtttgcaatggtttccagaagtgtgagcaattactgcgcgagtatggccagttttgttccaaaataaaccaggctctccatggtgccaatttacgccaggatgattctgtacgtaatttgtttgcgagcgtgaaaagctctcaatcatctcctatcataccaggttttggaggtgactttaatttgacacttctagaacctgtttctatatctactggcagtcgtagtgcacgtagtgctattgaggatttgctatttgacaaagtcactatagctgatcctggttatatgcaaggttacgatgattgtatgcagcaaggtccagcatcagctcgtgatcttatttgtgctcaatatgtggctggttataaagtattacctcctcttatggatgttaatatggaagccgcgtatacttcatctttgcttggcagcatagcaggtgttggctggactgctggcttatcctcctttgctgctattccatttgcacagagtatyttttataggttaaacggtgttggcattactcaacaggttctttcagagaaccaaaagcttattgccaataagtttaatcaggctctgggagctatgcaaacaggcttcactacaactaatgaagcttttcggaaggttcaggatgctgtgaacaacaatgcacaggctctatccaaattagctagcgagctatctaatacttttggtgctatttccgcctctattggagacatcatacaacgtcttgatgttctcgaacaggacgcccaaatagacagacttattaatggccgtttgacaacactaaatgcttttgttgcacagcagcttgttcgttccgaatcagctgctctttccgctcaattggctaaagataaagtcaatgagtgtgtcaaggcacaatccaagcgttctggattttgcggtcaaggcacacatatagtgtcctttgttgtaaatgcccctaatggcctttactttatgcatgttggttattaccctagcaaccacattgaggttgtttctgcttatggtctttgcgatgcagctaaccctactaattgtatagcccctgttaatggctactttattaaaactaataacactaggattgttgatgagtggtcatatactggctcgtccttctatgcacctgagcccatcacctctcttaatactaagtatgttgcaccacaggtgacataccaaaacatttctactaacctccctcctcctcttctcggcaattccaccgggattgacttccaagatgagttggatgagtttttcaaaaatgttagcaccagtatacctaattttggttctctaacacagattaatactacattactcgatcttacctacgagatgttgtctcttcaacaagttgttaaagcccttaatgagtcttacatagaccttaaagagcttggcaattatacttattacaacaaatggccgtggtacatttggcttggtttcattgctgggcttgttgccttagctctatgcgtcttcttcatactgtgctgcactggttgtggcacaaactgtatgggaaaacttaagtgtaatcgttgttgtgatagatacgaggaatacgacctcgagccgcataaggttcatgttcactaa

SEQ ID NO: 21 - DNA, 4062 bp, synthetic construct
  misc_feature 1..4062: note = Synthetic Polynucleotide
  source 1..4062: mol_type = other DNA
atgatacactcagtgtttctactgatgttcttgttaacacctacagaaagttacgttgatgtagggccagattctgttaagtctgcttgtattgaggttgatatacaacagactttctttgataaaacttggcctaggccaattgatgtttctaaggctgacggtattatataccctcaaggccgtacatattctaacataactatcacttatcaaggtctttttccctatcagggagaccatggtgatatgtatgtttactctgcaggacatgctacaggcacaactccacaaaagttgtttgtagctaactattctcaggacgtcaaacagtttgctaatgggtttgtcgtccgtataggagcagctgccaattccactggcactgttattattagcccatctaccagcgctactatacgaaaaatttaccctgcttttatgctgggttcttcagttggtaatttctcagatggtaaaatgggccgcttcttcaatcatactctagttcttttgcccgatggatgtggcactttacttagagctttttattgtattctggagcctcgctctggaaatcattgtcctgctggcaattcctatacttcttttgccacttatcacactcctgcaacagattgttctgatggcaattacaatcgtaatgccagtctgaactcttttaaggagtattttaatttacgtaactgcacctttatgtacacttataacattaccgaagatgagattttagagtggtttggcattacacaaactgctcaaggtgttcacctcttctcatctcggtatgttgatttgtacggcggcaatatgtttcaatttgccaccttgcctgtttatgatactattaagtattattctatcattcctcacagtattcgttctatccaaagtgatagaaaagcttgggctgccttctacgtatataaacttcaaccgttaactttcctgttggatttttctgttgatggttatatacgcagagctatagactgtggttttaatgatttgtcacaactccactgctcatatgaatccttcgatgttgaatctggagtttattcagtttcgtctttcgaagcaaaaccttctggctcagttgtggaacaggctgaaggtgttgaatgtgatttttcacctcttctgtctggcacacctcctcaggtttataatttcaagcgtttggtttttaccaattgcaattataatcttaccaaattgctttcacttttttctgtgaatgattttacttgtagtcaaatatctccagcagcaattgctagcaactgttattcttcactgattttggattacttttcatacccacttagtatgaaatccgatctcagtgttagttctgctggtccaatatcccagtttaattataaacagtccttttctaatcccacatgtttgattttagcgactgttcctcataaccttactactattactaagcctcttaagtacagctatattaacaagtgctctcgtcttctttctgatgatcgtactgaagtacctcagttagtgaacgctaatcaatactcaccctgtgtatccattgtcccatccactgtgtgggaagacggtgattattataggaaacaactatctccacttgaaggtggtggctggcttgttgctagtggctcaactgttgccatgactgagcaattacagatgggctttggtattacagttcaatatggtacagacaccaatagtgtttgccccaagcttgaatttgctaatgacacaaaaattgcctctcaattaggcaattgcgtggaatattccctctatggtgtttcgggccgtggtgtttttcagaattgcacagctgtaggtgttcgacagcagcgctttgtttatgatgcgtaccagaatttagttggctattattctgatgatggcaactactactgtttgcgtgcttgtgttagtgttcctgtttctgtcatctatgataaagaaactaaaacccacgctactctatttggtagtgttgcatgtgaacacatttcttctaccatgtctcaatactcccgttctacgcgatcaatgcttaaacggcgagattctacatatggcccccttcagacacctgttggttgtgtcctaggacttgttaattcctctttgttcgtagaggactgcaagttgcctcttggtcaatctctctgtgctcttcctgacacacctagtactctcacacctcgcagtgtgcgctctgttccaggtgaaatgcgcttggcatccattgcttttaatcatcctattcaggttgatcaacttaatagtagttattttaaattaagtatacccactaatttttcctttggtgtgactcaggagtacattcagacaaccattcagaaagttactgttgattgtaaacagtacgtttgcaatggtttccagaagtgtgagcaattactgcgcgagtatggccagttttgttccaaaataaaccaggctctccatggtgccaatttacgccaggatgattctgtacgtaatttgtttgcgagcgtgaaaagctctcaatcatctcctatcataccaggttttggaggtgactttaatttgacacttctggaacctgtttctatatctactggcagtcgtagtgcacgtagtgctattgaggatttgctatttgacaaagtcactatagctgatcctggttatatgcaaggttacgatgattgcatgcagcaaggtccagcatcagctcgtgatcttatttgtgctcaatatgtggctggttacaaagtattacctcctcttatggatgttaatatggaagccgcgtatacttcatctttgcttggcagcatagcaggtgttggctggactgctggcttatcctcctttgctgctattccatttgcacagagtatcttttataggttaaacggtgttggcattactcaacaggttctttcagagaaccaaaagcttattgccaataagtttaatcaggctctgggagctatgcaaacaggcttcactacaactaatgaagcttttcagaaggttcaggatgctgtgaacaacaatgcacaggctctatccaaattagctagcgagctatctaatacttttggtgctatttccgcctctattggagacatcatacaacgtcttgatgttctcgaacaggacgcccaaatagacagacttattaatggccgtttgacaacactaaatgcttttgttgcacagcagcttgttcgttccgaatcagctgctctttccgctcaattggctaaagataaagtcaatgagtgtgtcaaggcacaatccaagcgttctggattttgcggtcaaggcacacatatagtgtcctttgttgtaaatgcccctaatggcctttacttcatgcatgttggttattaccctagcaaccacattgaggttgtttctgcttatggtctttgcgatgcagctaaccctactaattgtatagcccctgttaatggctactttattaaaactaataacactaggattgttgatgagtggtcatatactggctcgtccttctatgcacctgagcccattacctcccttaatactaagtatgttgcaccacaggtgacataccaaaacatttctactaacctccctcctcctcttctcggcaattccaccgggattgacttccaagatgagttggatgagtttttcaaaaatgttagcaccagtatacctaattttggttccctaacacagattaatactacattactcgatcttacctacgagatgttgtctcttcaacaagttgttaaagcccttaatgagtcttacatagaccttaaagagcttggcaattatacttattacaacaaatggccgtggtacatttggcttggtttcattgctgggcttgttgccttagctctatgcgtcttcttcatactgtgctgcactggttgtggcacaaactgtatgggaaaacttaagtgtaatcgttgttgtgatagatacgaggaatacgacctcgagccgcataaggttcatgttcactaa

SEQ ID NO: 22 - DNA, 1845 bp, synthetic construct
  misc_feature 1..1845: note = Synthetic Polynucleotide
  source 1..1845: mol_type = other DNA
atgatccactccgtgttcctcctcatgttcctgttgacccccactgagtcagactgcaagctcccgctgggacagtccctgtgtgcgctgcctgacactcctagcactctgaccccacgctccgtgcggtcggtgcctggcgaaatgcggctggcctccatcgccttcaatcacccaatccaagtggatcagctgaatagctcgtatttcaagctgtccatccccacgaacttctcgttcggggtcacccaggagtacatccagaccacaattcagaaggtcaccgtcgattgcaagcaatacgtgtgcaacggcttccagaagtgcgagcagctgctgagagaatacgggcagttttgcagcaagatcaaccaggcgctgcatggagctaacttgcgccaggacgactccgtgcgcaacctctttgcctctgtgaagtcatcccagtcctccccaatcatcccgggattcggaggggacttcaacctgaccctcctggagcccgtgtcgatcagcaccggtagcagatcggcgcgctcagccattgaagatcttctgttcgacaaggtcaccatcgccgatccgggctacatgcagggatacgacgactgtatgcagcagggaccagcctccgcgagggacctcatctgcgcgcaatacgtggccgggtacaaagtgctgcctcctctgatggatgtgaacatggaggccgcttatacttcgtccctgctcggctctatcgccggcgtggggtggaccgccggcctgtcctccttcgccgctatcccctttgcacaatccattttctaccggctcaacggcgtgggcattactcaacaagtcctgtcggagaaccagaagttgatcgcaaacaagttcaatcaggccctgggggccatgcagactggattcactacgactaacgaagcgttccagaaggtccaggacgctgtgaacaacaacgcccaggcgctctcaaagctggcctccgaactcagcaacaccttcggagccatcagcgcatcgatcggtgacataattcagcggctggacgtgctggagcaggacgcccagatcgaccgcctcatcaacggacggctgaccaccttgaatgccttcgtggcacaacagctggtccggagcgaatcagcggcactttccgcccaactcgccaaggacaaagtcaacgaatgcgtgaaggcccagtccaagaggtccggtttctgcggtcaaggaacccatattgtgtccttcgtcgtgaacgcgcccaacggtctgtactttatgcacgtcggctactacccgagcaatcatatcgaagtggtgtccgcctacggcctgtgcgatgccgctaaccccactaactgtattgcccctgtgaacggatattttattaagaccaacaacacccgcattgtggacgaatggtcatacaccggttcgtccttctacgcgcccgagcccatcacttcactgaacaccaaatacgtggctccgcaagtgacctaccagaacatctccaccaatttgccgccgccgctgctcggaaacagcaccggaattgatttccaagatgaactggacgaattcttcaagaacgtgtccacttccattcccaacttcggaagcctgacacagatcaacaccacccttctcgacctgacctacgagatgctgagccttcaacaagtggtcaaggccctgaacgagagctacatcgacctgaaggagctgggcaactatacctactacaacaagtggccggacaagattgaggagattctgtcgaaaatctaccacattgaaaacgagatcgccagaatcaagaagcttatcggcgaagcc

SEQ ID NO: 23 - DNA, 4071 bp, synthetic construct
  misc_feature 1..4071: note = Synthetic Polynucleotide
  source 1..4071: mol_type = other DNA
atggaaacccctgcccagctgctgttcctgctgctgctgtggctgcctgataccaccggcagctatgtggacgtgggccccgatagcgtgaagtccgcctgtatcgaagtggacatccagcagacctttttcgacaagacctggcccagacccatcgacgtgtccaaggccgacggcatcatctatccacaaggccggacctacagcaacatcaccattacctaccagggcctgttcccatatcaaggcgaccacggcgatatgtacgtgtactctgccggccacgccaccggcaccacaccccagaaactgttcgtggccaactacagccaggacgtgaagcagttcgccaacggcttcgtcgtgcggattggcgccgctgccaatagcaccggcacagtgatcatcagccccagcaccagcgccaccatccggaagatctaccccgccttcatgctgggcagctccgtgggcaatttcagcgacggcaagatgggccggttcttcaaccacaccctggtgctgctgcccgatggctgtggcacactgctgagagccttctactgcatcctggaacccagaagcggcaaccactgccctgccggcaatagctacaccagcttcgccacctaccacacacccgccaccgattgctccgacggcaactacaaccggaacgccagcctgaacagcttcaaagagtacttcaacctgcggaactgcaccttcatgtacacctacaatatcaccgaggacgagatcctggaatggttcggcatcacccagaccgcccagggcgtgcacctgttcagcagcagatacgtggacctgtacggcggcaacatgttccagtttgccaccctgcccgtgtacgacaccatcaagtactacagcatcatcccccacagcatccggtccatccagagcgacagaaaagcctgggccgccttctacgtgtacaagctgcagcccctgaccttcctgctggacttcagcgtggacggctacatcagacgggccatcgactgcggcttcaacgacctgagccagctgcactgctcctacgagagcttcgacgtggaaagcggcgtgtacagcgtgtccagcttcgaggccaagcctagcggcagcgtggtggaacaggctgagggcgtggaatgcgacttcagccctctgctgagcggcacccctccccaggtgtacaacttcaagcggctggtgttcaccaactgcaattacaacctgaccaagctgctgagcctgttctccgtgaacgacttcacctgtagccagatcagccctgccgccattgccagcaactgctacagcagcctgatcctggactacttcagctaccccctgagcatgaagtccgatctgagcgtgtcctccgccggacccatcagccagttcaactacaagcagagcttcagcaaccctacctgcctgattctggccaccgtgccccacaatctgaccaccatcaccaagcccctgaagtacagctacatcaacaagtgcagcagactgctgtccgacgaccggaccgaagtgccccagctcgtgaacgccaaccagtacagcccctgcgtgtccatcgtgcccagcaccgtgtgggaggacggcgactactacagaaagcagctgagccccctggaaggcggcggatggctggtggcttctggaagcacagtggccatgaccgagcagctgcagatgggctttggcatcaccgtgcagtacggcaccgacaccaacagcgtgtgccccaagctggaattcgccaatgacaccaagatcgccagccagctgggaaactgcgtggaatactccctgtatggcgtgtccggacggggcgtgttccagaattgcacagcagtgggagtgcggcagcagagattcgtgtacgatgcctaccagaacctcgtgggctactacagcgacgacggcaattactactgcctgcgggcctgtgtgtccgtgcccgtgtccgtgatctacgacaaagagacaaagacccacgccacactgttcggctccgtggcctgcgagcacatcagctccaccatgagccagtactcccgctccacccggtccatgctgaagcggagagatagcacctacggccccctgcagacacctgtgggatgtgtgctgggcctcgtgaacagctccctgtttgtggaagattgcaagctgcccctgggccagagcctgtgtgccctgccagatacccctagcaccctgacccctagaagcgtgcgctctgtgcccggcgaaatgcggctggcctctatcgccttcaatcaccccatccaggtggaccagctgaactccagctacttcaagctgagcatccccaccaacttcagcttcggcgtgacccaggagtacatccagaccacaatccagaaagtgaccgtggactgcaagcagtacgtgtgcaacggctttcagaagtgcgaacagctgctgcgcgagtacggccagttctgcagcaagatcaaccaggccctgcacggcgccaacctgagacaggatgacagcgtgcggaacctgttcgccagcgtgaaaagcagccagtccagccccatcatccctggcttcggcggcgactttaacctgaccctgctggaacctgtgtccatcagcaccggctccagaagcgccagatccgccatcgaggacctgctgttcgacaaagtgaccattgccgaccccggctacatgcagggctacgacgattgcatgcagcagggcccagccagcgccagggatctgatctgtgcccagtatgtggccggctacaaggtgctgccccccctgatggacgtgaacatggaagccgcctacacctccagcctgctgggctctattgctggcgtgggatggacagccggcctgtctagctttgccgccatccctttcgcccagagcatcttctaccggctgaacggcgtgggcatcacacaacaggtgctgagcgagaaccagaagctgatcgccaacaagtttaaccaggcactgggcgccatgcagaccggcttcaccaccaccaacgaggccttcagaaaggtgcaggacgccgtgaacaacaacgcccaggctctgagcaagctggcctccgagctgagcaataccttcggcgccatcagcgcctccatcggcgacatcatccagcggctggacgtgctggaacaggacgcccagatcgaccggctgatcaacggcagactgaccaccctgaacgccttcgtggcacagcagctcgtgcggagcgaatctgccgctctgtctgctcagctggccaaggacaaagtgaacgagtgcgtgaaggcccagtccaagcggagcggcttttgtggccagggcacccacatcgtgtccttcgtcgtgaatgcccccaacggcctgtactttatgcacgtgggctattaccccagcaaccacatcgaggtggtgtccgcctatggcctgtgcgacgccgccaatcctaccaactgtatcgcccccgtgaacggctacttcatcaagaccaacaacacccggatcgtggacgagtggtcctacacaggcagcagcttctacgcccccgagcccatcacctccctgaacaccaaatacgtggccccccaagtgacataccagaacatctccaccaacctgccccctccactgctgggaaattccaccggcatcgacttccaggacgagctggacgagttcttcaagaacgtgtccacctccatccccaacttcggcagcctgacccagatcaacaccactctgctggacctgacctacgagatgctgtccctgcaacaggtcgtgaaagccctgaacgagagctacatcgacctgaaagagctggggaactacacctactacaacaagtggccttggtacatttggctgggctttatcgccggcctggtggccctggccctgtgcgtgttcttcatcctgtgctgcaccggctgcggcaccaattgcatgggcaagctgaaatgcaaccggtgctgcgacagatacgaggaatacgacctggaacctcacaaagtgcatgtgcac

SEQ ID NO: 24 - protein, 1353 aa, Middle East respiratory syndrome coronavirus
MIHSVFLLMFLLTPTESYVDVGPDSVKSACIEVDIQQTFFDKTWPRPIDVSKADGIIYPQGRTYSNITITYQGLFPYQGDHGDMYVYSAGHATGTTPQKLFVANYSQDVKQFANGFVVRIGAAANSTGTVIISPSTSATIRKIYPAFMLGSSVGNFSDGKMGRFFNHTLVLLPDGCGTLLRAFYCILEPRSGNHCPAGNSYTSFATYHTPATDCSDGNYNRNASLNSFKEYFNLRNCTFMYTYNITEDEILEWFGITQTAQGVHLFSSRYVDLYGGNMFQFATLPVYDTIKYYSIIPHSIRSIQSDRKAWAAFYVYKLQPLTFLLDFSVDGYIRRAIDCGFNDLSQLHCSYESFDVESGVYSVSSFEAKPSGSVVEQAEGVECDFSPLLSGTPPQVYNFKRLVFTNCNYNLTKLLSLFSVNDFTCSQISPAAIASNCYSSLILDYFSYPLSMKSDLSVSSAGPISQFNYKQSFSNPTCLILATVPHNLTTITKPLKYSYINKCSRLLSDDRTEVPQLVNANQYSPCVSIVPSTVWEDGDYYRKQLSPLEGGGWLVASGSTVAMTEQLQMGFGITVQYGTDTNSVCPKLEFANDTKIASQLGNCVEYSLYGVSGRGVFQNCTAVGVRQQRFVYDAYQNLVGYYSDDGNYYCLRACVSVPVSVIYDKETKTHATLFGSVACEHISSTMSQYSRSTRSMLKRRDSTYGPLQTPVGCVLGLVNSSLFVEDCKLPLGQSLCALPDTPSTLTPRSVRSVPGEMRLASIAFNHPIQVDQLNSSYFKLSIPTNFSFGVTQEYIQTTIQKVTVDCKQYVCNGFQKCEQLLREYGQFCSKINQALHGANLRQDDSVRNLFASVKSSQSSPIIPGFGGDFNLTLLEPVSISTGSRSARSAIEDLLFDKVTIADPGYMQGYDDCMQQGPASARDLICAQYVAGYKVLPPLMDVNMEAAYTSSLLGSIAGVGWTAGLSSFAAIPFAQSIFYRLNGVGITQQVLSENQKLIANKFNQALGAMQTGFTTTNEAFRKVQDAVNNNAQALSKLASELSNTFGAISASIGDIIQRLDVLEQDAQIDRLINGRLTTLNAFVAQQLVRSESAALSAQLAKDKVNECVKAQSKRSGFCGQGTHIVSFVVNAPNGLYFMHVGYYPSNHIEVVSAYGLCDAANPTNCIAPVNGYFIKTNNTRIVDEWSYTGSSFYAPEPITSLNTKYVAPQVTYQNISTNLPPPLLGNSTGIDFQDELDEFFKNVSTSIPNFGSLTQINTTLLDLTYEMLSLQQVVKALNESYIDLKELGNYTYYNKWPWYIWLGFIAGLVALALCVFFILCCTGCGTNCMGKLKCNRCCDRYEEYDLEPHKVHVH

SEQ ID NO: 25 - protein, 1353 aa, synthetic construct
  REGION 1..1353: note = Synthetic Polypeptide
MIHSVFLLMFLLTPTESYVDVGPDSVKSACIEVDIQQTFFDKTWPRPIDVSKADGIIYPQGRTYSNITITYQGLFPYQGDHGDMYVYSAGHATGTTPQKLFVANYSQDVKQFANGFVVRIGAAANSTGTVIISPSTSATIRKIYPAFMLGSSVGNFSDGKMGRFFNHTLVLLPDGCGTLLRAFYCILEPRSGNHCPAGNSYTSFATYHTPATDCSDGNYNRNASLNSFKEYFNLRNCTFMYTYNITEDEILEWFGITQTAQGVHLFSSRYVDLYGGNMFQFATLPVYDTIKYYSIIPHSIRSIQSDRKAWAAFYVYKLQPLTFLLDFSVDGYIRRAIDCGFNDLSQLHCSYESFDVESGVYSVSSFEAKPSGSVVEQAEGVECDFSPLLSGTPPQVYNFKRLVFTNCNYNLTKLLSLFSVNDFTCSQISPAAIASNCYSSLILDYFSYPLSMKSDLSVSSAGPISQFNYKQSFSNPTCLILATVPHNLTTITKPLKYSYINKCSRLLSDDRTEVPQLVNANQYSPCVSIVPSTVWEDGDYYRKQLSPLEGGGWLVASGSTVAMTEQLQMGFGITVQYGTDTNSVCPKLEFANDTKIASQLGNCVEYSLYGVSGRGVFQNCTAVGVRQQRFVYDAYQNLVGYYSDDGNYYCLRACVSVPVSVIYDKETKTHATLFGSVACEHISSTMSQYSRSTRSMLKRRDSTYGPLQTPVGCVLGLVNSSLFVEDCKLPLGQSLCALPDTPSTLTPRSVRSVPGEMRLASIAFNHPIQVDQLNSSYFKLSIPTNFSFGVTQEYIQTTIQKVTVDCKQYVCNGFQKCEQLLREYGQFCSKINQALHGANLRQDDSVRNLFASVKSSQSSPIIPGFGGDFNLTLLEPVSISTGSRSARSAIEDLLFDKVTIADPGYMQGYDDCMQQGPASARDLICAQYVAGYKVLPPLMDVNMEAAYTSSLLGSIAGVGWTAGLSSFAAIPFAQSIFYRLNGVGITQQVLSENQKLIANKFNQALGAMQTGFTTTNEAFQKVQDAVNNNAQALSKLASELSNTFGAISASIGDIIQRLDVLEQDAQIDRLINGRLTTLNAFVAQQLVRSESAALSAQLAKDKVNECVKAQSKRSGFCGQGTHIVSFVVNAPNGLYFMHVGYYPSNHIEVVSAYGLCDAANPTNCIAPVNGYFIKTNNTRIVDEWSYTGSSFYAPEPITSLNTKYVAPQVTYQNISTNLPPPLLGNSTGIDFQDELDEFFKNVSTSIPNFGSLTQINTTLLDLTYEMLSLQQVVKALNESYIDLKELGNYTYYNKWPWYIWLGFIAGLVALALCVFFILCCTGCGTNCMGKLKCNRCCDRYEEYDLEPHKVHVH

SEQ ID NO: 26 - protein, 615 aa, synthetic construct
  REGION 1..615: note = Synthetic Polypeptide
MIHSVFLLMFLLTPTESDCKLPLGQSLCALPDTPSTLTPRSVRSVPGEMRLASIAFNHPIQVDQLNSSYFKLSIPTNFSFGVTQEYIQTTIQKVTVDCKQYVCNGFQKCEQLLREYGQFCSKINQALHGANLRQDDSVRNLFASVKSSQSSPIIPGFGGDFNLTLLEPVSISTGSRSARSAIEDLLFDKVTIADPGYMQGYDDCMQQGPASARDLICAQYVAGYKVLPPLMDVNMEAAYTSSLLGSIAGVGWTAGLSSFAAIPFAQSIFYRLNGVGITQQVLSENQKLIANKFNQALGAMQTGFTTTNEAFQKVQDAVNNNAQALSKLASELSNTFGAISASIGDIIQRLDVLEQDAQIDRLINGRLTTLNAFVAQQLVRSESAALSAQLAKDKVNECVKAQSKRSGFCGQGTHIVSFVVNAPNGLYFMHVGYYPSNHIEVVSAYGLCDAANPTNCIAPVNGYFIKTNNTRIVDEWSYTGSSFYAPEPITSLNTKYVAPQVTYQNISTNLPPPLLGNSTGIDFQDELDEFFKNVSTSIPNFGSLTQINTTLLDLTYEMLSLQQVVKALNESYIDLKELGNYTYYNKWPDKIEEILSKIYHIENEIARIKKLIGEA

SEQ ID NO: 27 - protein, 1353 aa, Middle East respiratory syndrome coronavirus
MIHSVFLLMFLLTPTESYVDVGPDSVKSACIEVDIQQTFFDKTWPRPIDVSKADGIIYPQGRTYSNITITYQGLFPYQGDHGDMYVYSAGHATGTTPQKLFVANYSQDVKQFANGFVVRIGAAANSTGTVIISPSTSATIRKIYPAFMLGSSVGNFSDGKMGRFFNHTLVLLPDGCGTLLRAFYCILEPRSGNHCPAGNSYTSFATYHTPATDCSDGNYNRNASLNSFKEYFNLRNCTFMYTYNITEDEILEWFGITQTAQGVHLFSSRYVDLYGGNMFQFATLPVYDTIKYYSIIPHSIRSIQSDRKAWAAFYVYKLQPLTFLLDFSVDGYIRRAIDCGFNDLSQLHCSYESFDVESGVYSVSSFEAKPSGSVVEQAEGVECDFSPLLSGTPPQVYNFKRLVFTNCNYNLTKLLSLFSVNDFTCSQISPAAIASNCYSSLILDYFSYPLSMKSDLSVSSAGPISQFNYKQSFSNPTCLILATVPHNLTTITKPLKYSYINKCSRLLSDDRTEVPQLVNANQYSPCVSIVPSTVWEDGDYYRKQLSPLEGGGWLVASGSTVAMTEQLQMGFGITVQYGTDTNSVCPKLEFANDTKIASQLGNCVEYSLYGVSGRGVFQNCTAVGVRQQRFVYDAYQNLVGYYSDDGNYYCLRACVSVPVSVIYDKETKTHATLFGSVACEHISSTMSQYSRSTRSMLKRRDSTYGPLQTPVGCVLGLVNSSLFVEDCKLPLGQSLCALPDTPSTLTPRSVRSVPGEMRLASIAFNHPIQVDQLNSSYFKLSIPTNFSFGVTQEYIQTTIQKVTVDCKQYVCNGFQKCEQLLREYGQFCSKINQALHGANLRQDDSVRNLFASVKSSQSSPIIPGFGGDFNLTLLEPVSISTGSRSARSAIEDLLFDKVTIADPGYMQGYDDCMQQGPASARDLICAQYVAGYKVLPPLMDVNMEAAYTSSLLGSIAGVGWTAGLSSFAAIPFAQSIFYRLNGVGITQQVLSENQKLIANKFNQALGAMQTGFTTTNEAFRKVQDAVNNNAQALSKLASELSNTFGAISASIGDIIQRLDVLEQDAQIDRLINGRLTTLNAFVAQQLVRSESAALSAQLAKDKVNECVKAQSKRSGFCGQGTHIVSFVVNAPNGLYFMHVGYYPSNHIEVVSAYGLCDAANPTNCIAPVNGYFIKTNNTRIVDEWSYTGSSFYAPEPITSLNTKYVAPHVTYQNISTNLPPPLLGNSTGIDFQDELDEFFKNVSTSIPNFGSLTQINTTLLDLTYEMLSLQQVVKALNESYIDLKELGNYTYYNKWPWYIWLGFIAGLVALALCVFFILCCTGCGTNCMGKLKCNRCCDRYEEYDLEPHKVHVH

SEQ ID NO: 28 - protein, 1353 aa, Middle East respiratory syndrome coronavirus; identical to SEQ ID NO: 27

SEQ ID NO: 29 - protein, 1255 aa, Human SARS coronavirus
MFIFLLFLTLTSGSDLDRCTTFDDVQAPNYTQHTSSMRGVYYPDEIFRSDTLYLTQDLFLPFYSNVTGFHTINHTFGNPVIPFKDGIYFAATEKSNVVRGWVFGSTMNNKSQSVIIINNSTNVVIRACNFELCDNPFFAVSKPMGTQTHTMIFDNAFNCTFEYISDAFSLDVSEKSGNFKHLREFVFKNKDGFLYVYKGYQPIDVVRDLPSGFNTLKPIFKLPLGINITNFRAILTAFSPAQDIWGTSAAAYFVGYLKPTTFMLKYDENGTITDAVDCSQNPLAELKCSVKSFEIDKGIYQTSNFRVVPSGDVVRFPNITNLCPFGEVFNATKFPSVYAWERKKISNCVADYSVLYNSTFFSTFKCYGVSATKLNDLCFSNVYADSFVVKGDDVRQIAPGQTGVIADYNYKLPDDFMGCVLAWNTRNIDATSTGNYNYKYRYLRHGKLRPFERDISNVPFSPDGKPCTPPALNCYWPLNDYGFYTTTGIGYQPYRVVVLSFELLNAPATVCGPKLSTDLIKNQCVNFNFNGLTGTGVLTPSSKRFQPFQQFGRDVSDFTDSVRDPKTSEILDISPCSFGGVSVITPGTNASSEVAVLYQDVNCTDVSTAIHADQLTPAWRIYSTGNNVFQTQAGCLIGAEHVDTSYECDIPIGAGICASYHTVSLLRSTSQKSIVAYTMSLGADSSIAYSNNTIAIPTNFSISITTEVMPVSMAKTSVDCNMYICGDSTECANLLLQYGSFCTQLNRALSGIAAEQDRNTREVFAQVKQMYKTPTLKYFGGFNFSQILPDPLKPTKRSFIEDLLFNKVTLADAGFMKQYGECLGDINARDLICAQKFNGLTVLPPLLTDDMIAAYTAALVSGTATAGWTFGAGAALQIPFAMQMAYRFNGIGVTQNVLYENQKQIANQFNKAISQIQESLTTTSTALGKLQDVVNQNAQALNTLVKQLSSNFGAISSVLNDILSRLDKVEAEVQIDRLITGRLQSLQTYVTQQLIRAAEIRASANLAATKMSECVLGQSKRVDFCGKGYHLMSFPQAAPHGVVFLHVTYVPSQERNFTTAPAICHEGKAYFPREGVFVFNGTSWFITQRNFFSPQIITTDNTFVSGNCDVVIGIINNTVYDPLQPELDSFKEELDKYFKNHTSPDVDLGDISGINASVVNIQKEIDRLNEVAKNLNESLIDLQELGKYEQYIKWPWYVWLGFIAGLIAIVMVTILLCCMTSCCSCLKGACSCGSCCKFDEDDSEPVLKGVKLHYT

SEQ ID NO: 30 - protein, 1353 aa, Human coronavirus
MFLILLISLPTAFAVIGDLKCTSDNINDKDTGPPPISTDTVDVTNGLGTYYVLDRVYLNTTLFLNGYYPTSGSTYRNMALKGSVLLSRLWFKPPFLSDFINGIFAKVKNTKVIKDRVMYSEFPAITIGSTFVNTSYSVVVQPRTINSTQDGDNKLQGLLEVSVCQYNMCEYPQTICHPNLGNHRKELWHLDTGVVSCLYKRNFTYDVNADYLYFHFYQEGGTFYAYFTDTGVVTKFLFNVYLGMALSHYYVMPLTCNSKLTLEYWVTPLTSRQYLLAFNQDGIIFNAEDCMSDFMSEIKCKTQSIAPPTGVYELNGYTVQPIADVYRRKPNLPNCNIEAWLNDKSVPSPLNWERKTFSNCNFNMSSLMSFIQADSFTCNNIDAAKIYGMCFSSITIDKFAIPNGRKVDLQLGNLGYLQSFNYRIDTTATSCQLYYNLPAANVSVSRFNPSTWNKRFGFIEDSVFKPRPAGVLTNHDVVYAQHCFKAPKNFCPCKLNGSCVGSGPGKNNGIGTCPAGTNYLTCDNLCTPDPITFTGTYKCPQTKSLVGIGEHCSGLAVKSDYCGGNSCTCRPQAFLGWSADSCLQGDKCNIFANFILHDVNSGLTCSTDLQKANTDIILGVCVNYDLYGILGQGIFVEVNATYYNSWQNLLYDSNGNLYGFRDYIINRTFMIRSCYSGRVSAAFHANSSEPALLFRNIKCNYVFNNSLTRQLQPINYFDSYLGCVVNAYNSTAISVQTCDLTVGSGYCVDYSKNRRSRGAITTGYRFTNFEPFTVNSVNDSLEPVGGLYEIQIPSEFTIGNMVEFIQTSSPKVTIDCAAFVCGDYAACKSQLVEYGSFCDNINAILTEVNELLDTTQLQVANSLMNGVTLSTKLKDGVNFNVDDINFSPVLGCLGSECSKASSRSAIEDLLFDKVKLSDVGFVEAYNNCTGGAEIRDLICVQSYKGIKVLPPLLSENQISGYTLAATSASLFPPWTAAAGVPFYLNVQYRINGLGVTMDVLSQNQKLIANAFNNALYAIQEGFDATNSALVKIQAVVNANAEALNNLLQQLSNRFGAISASLQEILSRLDALEAEAQIDRLINGRLTALNAYVSQQLSDSTLVKFSAAQAMEKVNECVKSQSSRINFCGNGNHIISLVQNAPYGLYFIHFSYVPTKYVTARVSPGLCIAGDRGIAPKSGYFVNVNNTWMYTGSGYYYPEPITENNVVVMSTCAVNYTKAPYVMLNTSIPNLPDFKEELDQWFKNQTSVAPDLSLDYINVTFLDLQVEMNRLQEAIKVLNQSYINLKDIGTYEYYVKWPWYVWLLICLAGVAMLVLLFFICCCTGCGTSCFKKCGGCCDDYTGYQELVIKTSHDD

SEQ ID NO: 31 - protein, 1351 aa, Human coronavirus
MFLIIFILPTTLAVIGDFNCTNSFINDYNKTIPRISEDVVDVSLGLGTYYVLNRVYLNTTLLFTGYFPKSGANFRDLALKGSIYLSTLWYKPPFLSDFNNGIFSKVKNTKLYVNNTLYSEFSTIVIGSVFVNTSYTIVVQPHNGILEITACQYTMCEYPHTVCKSKGSIRNESWHIDSSEPLCLFKKNFTYNVSADWLYFHFYQERGVFYAYYADVGMPTTFLFSLYLGTILSHYYVMPLTCNAISSNTDNETLEYWVTPLSRRQYLLNFDEHGVITNAVDCSSSFLSEIQCKTQSFAPNTGVYDLSGFTVKPVATVYRRIPNLPDCDIDNWLNNVSVPSPLNWERRIFSNCNFNLSTLLRLVHVDSFSCNNLDKSKIFGSCFNSITVDKFAIPNRRRDDLQLGSSGFLQSSNYKIDISSSSCQLYYSLPLVNVTINNFNPSSWNRRYGFGSFNLSSYDVVYSDHCFSVNSDFCPCADPSVVNSCAKSKPPSAICPAGTKYRHCDLDTTLYVKNWCRCSCLPDPISTYSPNTCPQKKVVVGIGEHCPGLGINEEKCGTQLNHSSCFCSPDAFLGWSFDSCISNNRCNIFSNFIFNGINSGTTCSNDLLYSNTEISTGVCVNYDLYGITGQGIFKEVSAAYYNNWQNLLYDSNGNIIGFKDFLTNKTYTILPCYSGRVSAAFYQNSSSPALLYRNLKCSYVLNNISFISQPFYFDSYLGCVLNAVNLTSYSVSSCDLRMGSGFCIDYALPSSRRKRRGISSPYRFVTFEPFNVSFVNDSVETVGGLFEIQIPTNFTIAGHEEFIQTSSPKVTIDCSAFVCSNYAACHDLLSEYGTFCDNINSILNEVNDLLDITQLQVANALMQGVTLSSNLNTNLHSDVDNIDFKSLLGCLGSQCGSSSRSLLEDLLFNKVKLSDVGFVEAYNNCTGGSEIRDLLCVQSFNGIKVLPPILSETQISGYTTAATVAAMFPPWSAAAGVPFSLNVQYRINGLGVTMDVLNKNQKLIANAFNKALLSIQNGFTATNSALAKIQSVVNANAQALNSLLQQLFNKFGAISSSLQEILSRLDNLEAQVQIDRLINGRLTALNAYVSQQLSDITLIKAGASRAIEKVNECVKSQSPRINFCGNGNHILSLVQNAPYGLLFIHFSYKPTSFKTVLVSPGLCLSGDRGIAPKQGYFIKQNDSWMFTGSSYYYPEPISDKNVVFMNSCSVNFTKAPFIYLNNSIPNLSDFEAELSLWFKNHTSIAPNLTFNSHINATFLDLYYEMNVIQESIKSLNSSFINLKEIGTYEMYVKWPWYIWLLIVILFIIFLMILFFICCCTGCGSACFSKCHNCCDEYGGHNDFVIKASHDD

SEQ ID NO: 32 - protein, 526 aa, synthetic construct
  REGION 1..526: note = Synthetic Polypeptide
MFIFLLFLTLTSGSDLDRALSGIAAEQDRNTREVFAQVKQMYKTPTLKYFGGFNFSQILPDPLKPTKRSFIEDLLFNKVTLADAGFMKQYGECLGDINARDLICAQKFNGLTVLPPLLTDDMIAAYTAALVSGTATAGWTFGAGAALQIPFAMQMAYRFNGIGVTQNVLYENQKQIANQFNKAISQIQESLTTTSTALGKLQDVVNQNAQALNTLVKQLSSNFGAISSVLNDILSRLDKVEAEVQIDRLITGRLQSLQTYVTQQLIRAAEIRASANLAATKMSECVLGQSKRVDFCGKGYHLMSFPQAAPHGVVFLHVTYVPSQERNFTTAPAICHEGKAYFPREGVFVFNGTSWFITQRNFFSPQIITTDNTFVSGNCDVVIGIINNTVYDPLQPELDSFKEELDKYFKNHTSPDVDLGDISGINASVVNIQKEIDRLNEVAKNLNESLIDLQELGKYEQYIKWPWYVWLGFIAGLIAIVMVTILLCCMTSCCSCLKGACSCGSCCKFDEDDSEPVLKGVKLHYT

SEQ ID NO: 33 - protein, 588 aa, synthetic construct
  REGION 1..588: note = Synthetic Polypeptide
MIHSVFLLMFLLTPTESDCKLPLGQSLCALPDTPSTLTPRSVRSVPGEMRLASIAFNHPIQVDQLNSSYFKLSIPTNFSFGVTQEYIQTTIQKVTVDCKQYVCNGFQKCEQLLREYGQFCSKINQALHGANLRQDDSVRNLFASVKSSQSSPIIPGFGGDFNLTLLEPVSISTGSRSARSAIEDLLFDKVTIADPGYMQGYDDCMQQGPASARDLICAQYVAGYKVLPPLMDVNMEAAYTSSLLGSIAGVGWTAGLSSFAAIPFAQSIFYRLNGVGITQQVLSENQKLIANKFNQALGAMQTGFTTTNEAFQKVQDAVNNNAQALSKLASELSNTFGAISASIGDIIQRLDVLEQDAQIDRLINGRLTTLNAFVAQQLVRSESAALSAQLAKDKVNECVKAQSKRSGFCGQGTHIVSFVVNAPNGLYFMHVGYYPSNHIEVVSAYGLCDAANPTNCIAPVNGYFIKTNNTRIVDEWSYTGSSFYAPEPITSLNTKYVAPQVTYQNISTNLPPPLLGNSTGIDFQDELDEFFKNVSTSIPNFGSLTQINTTLLDLTYEMLSLQQVVKALNESYIDLKELGNYTYYNKWP

SEQ ID NO: 34 - protein, 526 aa, synthetic construct; identical to SEQ ID NO: 32
  REGION 1..526: note = Synthetic Polypeptide

SEQ ID NO: 35 - DNA, 1864 bp, synthetic construct
  misc_feature 1..1864: note = Synthetic Polynucleotide
  source 1..1864: mol_type = other DNA
tcaagcttttggaccctcgtacagaagctaatacgactcactatagggaaataagagagaaaagaagagtaagaagaaatataagagccaccatgggtctcaaggtgaacgtctctgccgtattcatggcagtactgttaactctccaaacacccgccggtcaaattcattggggcaatctctctaagataggggtagtaggaataggaagtgcaagctacaaagttatgactcgttccagccatcaatcattagtcataaaattaatgcccaatataactctcctcaataactgcacgagggtagagattgcagaatacaggagactactaagaacagttttggaaccaattagggatgcacttaatgcaatgacccagaacataaggccggttcagagcgtagcttcaagtaggagacacaagagatttgcgggagtagtcctggcaggtgcggccctaggtgttgccacagctgctcagataacagccggcattgcacttcaccggtccatgctgaactctcaggccatcgacaatctgagagcgagcctggaaactactaatcaggcaattgaggcaatcagacaagcagggcaggagatgatattggctgttcagggtgtccaagactacatcaataatgagctgataccgtctatgaaccagctatcttgtgatctaatcggtcagaagctcgggctcaaattgcttagatactatacagaaatcctgtcattatttggccccagcctacgggaccccatatctgcggagatatctatccaggctttgagttatgcacttggaggagatatcaataaggtgttagaaaagctcggatacagtggaggcgatttactaggcatcttagagagcagaggaataaaggctcggataactcacgtcgacacagagtcctacttcatagtcctcagtatagcctatccgacgctgtccgagattaagggggtgattgtccaccggctagagggggtctcgtacaacataggctctcaagagtggtataccactgtgcccaagtatgttgcaacccaagggtaccttatctcgaattttgatgagtcatcatgtactttcatgccagaggggactgtgtgcagccaaaatgccttgtacccgatgagtcctctgctccaagaatgcctccgggggtccaccaagtcctgtgctcgtacactcgtatccgggtcttttgggaaccggttcattttatcacaagggaacctaatagccaattgtgcatcaattctttgtaagtgttacacaacaggtacgattattaatcaagaccctgacaagatcctaacatacattgctgccgatcgctgcccggtagtcgaggtgaacggcgtgaccatccaagtcgggagcaggaggtatccagacgctgtgtacttgcacagaattgacctcggtcctcccatatcattggagaggttggacgtagggacaaatctggggaatgcaattgccaaattggaggatgccaaggaattgttggaatcatcggaccagatattgagaagtatgaaaggtttatcgagcactagcatagtctacatcctgattgcagtgtgtcttggagggttgatagggatccccactttaatatgttgctgcagggggcgttgtaacaaaaagggagaacaagttggtatgtcaagaccaggcctaaagcctgaccttacaggaacatcaaaatcctatgtaagatcgctttgatgataataggctggagcctcggtggccaagcttcttgccccttgggcctccccccagcccctcctccccttcctgcacccgtacccccgtggtctttgaataaagtctgagtgggcggc

SEQ ID NO: 36 - DNA, 1653 bp, synthetic construct
  misc_feature 1..1653: note = Synthetic Polynucleotide
  source 1..1653: mol_type = other DNA
atgggtctcaaggtgaacgtctctgccgtattcatggcagtactgttaactctccaaacacccgccggtcaaattcattggggcaatctctctaagataggggtagtaggaataggaagtgcaagctacaaagttatgactcgttccagccatcaatcattagtcataaaattaatgcccaatataactctcctcaataactgcacgagggtagagattgcagaatacaggagactactaagaacagttttggaaccaattagggatgcacttaatgcaatgacccagaacataaggccggttcagagcgtagcttcaagtaggagacacaagagatttgcgggagtagtcctggcaggtgcggccctaggtgttgccacagctgctcagataacagccggcattgcacttcaccggtccatgctgaactctcaggccatcgacaatctgagagcgagcctggaaactactaatcaggcaattgaggcaatcagacaagcagggcaggagatgatattggctgttcagggtgtccaagactacatcaataatgagctgataccgtctatgaaccagctatcttgtgatctaatcggtcagaagctcgggctcaaattgcttagatactatacagaaatcctgtcattatttggccccagcctacgggaccccatatctgcggagatatctatccaggctttgagttatgcacttggaggagatatcaataaggtgttagaaaagctcggatacagtggaggcgatttactaggcatcttagagagcagaggaataaaggctcggataactcacgtcgacacagagtcctacttcatagtcctcagtatagcctatccgacgctgtccgagattaagggggtgattgtccaccggctagagggggtctcgtacaacataggctctcaagagtggtataccactgtgcccaagtatgttgcaacccaagggtaccttatctcgaattttgatgagtcatcatgtactttcatgccagaggggactgtgtgcagccaaaatgccttgtacccgatgagtcctctgctccaagaatgcctccgggggtccaccaagtcctgtgctcgtacactcgtatccgggtcttttgggaaccggttcattttatcacaagggaacctaatagccaattgtgcatcaattctttgtaagtgttacacaacaggtacgattattaatcaagaccctgacaagatcctaacatacattgctgccgatcgctgcccggtagtcgaggtgaacggcgtgaccatccaagtcgggagcaggaggtatccagacgctgtgtacttgcacagaattgacctcggtcctcccatatcattggagaggttggacgtagggacaaatctggggaatgcaattgccaaattggaggatgccaaggaattgttggaatcatcggaccagatattgagaagtatgaaaggtttatcgagcactagcatagtctacatcctgattgcagtgtgtcttggagggttgatagggatccccactttaatatgttgctgcagggggcgttgtaacaaaaagggagaacaagttggtatgtcaagaccaggcctaaagcctgaccttacaggaacatcaaaatcctatgtaagatcgctttga

SEQ ID NO: 37 - DNA, 1925 bp, synthetic construct
  misc_feature 1..1925: note = Synthetic Polynucleotide
  source 1..1925: mol_type = other DNA
ggggaaataagagagaaaagaagagtaagaagaaatataagagccaccatgggtctcaaggtgaacgtctctgccgtattcatggcagtactgttaactctccaaacacccgccggtcaaattcattggggcaatctctctaagataggggtagtaggaataggaagtgcaagctacaaagttatgactcgttccagccatcaatcattagtcataaaattaatgcccaatataactctcctcaataactgcacgagggtagagattgcagaatacaggagactactaagaacagttttggaaccaattagggatgcacttaatgcaatgacccagaacataaggccggttcagagcgtagcttcaagtaggagacacaagagatttgcgggagtagtcctggcaggtgcggccctaggtgttgccacagctgctcagataacagccggcattgcacttcaccggtccatgctgaactctcaggccatcgacaatctgagagcgagcctggaaactactaatcaggcaattgaggcaatcagacaagcagggcaggagatgatattggctgttcagggtgtccaagactacatcaataatgagctgataccgtctatgaaccagctatcttgtgatctaatcggtcagaagctcgggctcaaattgcttagatactatacagaaatcctgtcattatttggccccagcctacgggaccccatatctgcggagatatctatccaggctttgagttatgcacttggaggagatatcaataaggtgttagaaaagctcggatacagtggaggcgatttactaggcatcttagagagcagaggaataaaggctcggataactcacgtcgacacagagtcctacttcatagtcctcagtatagcctatccgacgctgtccgagattaagggggtgattgtccaccggctagagggggtctcgtacaacataggctctcaagagtggtataccactgtgcccaagtatgttgcaacccaagggtaccttatctcgaattttgatgagtcatcatgtactttcatgccagaggggactgtgtgcagccaaaatgccttgtacccgatgagtcctctgctccaagaatgcctccgggggtccaccaagtcctgtgctcgtacactcgtatccgggtcttttgggaaccggttcattttatcacaagggaacctaatagccaattgtgcatcaattctttgtaagtgttacacaacaggtacgattattaatcaagaccctgacaagatcctaacatacattgctgccgatcgctgcccggtagtcgaggtgaacggcgtgaccatccaagtcgggagcaggaggtatccagacgctgtgtacttgcacagaattgacctcggtcctcccatatcattggagaggttggacgtagggacaaatctggggaatgcaattgccaaattggaggatgccaaggaattgttggaatcatcggaccagatattgagaagtatgaaaggtttatcgagcactagcatagtctacatcctgattgcagtgtgtcttggagggttgatagggatccccactttaatatgttgctgcagggggcgttgtaacaaaaagggagaacaagttggtatgtcaagaccaggcctaaagcctgaccttacaggaacatcaaaatcctatgtaagatcgctttgatgataataggctggagcctcggtggccaagcttcttgccccttgggcctccccccagcccctcctccccttcctgcacccgtacccccgtggtctttgaataaagtctgagtgggcggcaaaaaaaaaaaaaaaaaaaaaaaaaaaaaaaaaaaaaaaaaaaaaaaaaaaaaaaaaaaaaaaaaaaaaaaaaaaaaaaaaaaaaaaaaaaaaaaaaaaatctag

SEQ ID NO: 38 - DNA, 1864 bp, synthetic construct
  misc_feature 1..1864: note = Synthetic Polynucleotide
  source 1..1864: mol_type = other DNA
tcaagcttttggaccctcgtacagaagctaatacgactcactatagggaaataagagagaaaagaagagtaagaagaaatataagagccaccatgggtctcaaggtgaacgtctctgtcatattcatggcagtactgttaactcttcaaacacccaccggtcaaatccattggggcaatctctctaagataggggtggtaggggtaggaagtgcaagctacaaagttatgactcgttccagccatcaatcattagtcataaagttaatgcccaatataactctcctcaacaattgcacgagggtagggattgcagaatacaggagactactgagaacagttctggaaccaattagagatgcacttaatgcaatgacccagaatataagaccggttcagagtgtagcttcaagtaggagacacaagagatttgcgggagttgtcctggcaggtgcggccctaggcgttgccacagctgctcaaataacagccggtattgcacttcaccagtccatgctgaactctcaagccatcgacaatctgagagcgagcctagaaactactaatcaggcaattgaggcaatcagacaagcagggcaggagatgatattggctgttcagggtgtccaagactacatcaataatgagctgataccgtctatgaatcaactatcttgtgatttaatcggccagaagctagggctcaaattgctcagatactatacagaaatcctgtcattatttggccccagcttacgggaccccatatctgcggagatatctatccaggctttgagctatgcgcttggaggagatatcaataaggtgttggaaaagctcggatacagtggaggtgatctactgggcatcttagagagcagaggaataaaggcccggataactcacgtcgacacagagtcctacttcattgtactcagtatagcctatccgacgctatccgagattaagggggtgattgtccaccggctagagggggtctcgtacaacataggctctcaagagtggtataccactgtgcccaagtatgttgcaacccaagggtaccttatctcgaattttgatgagtcatcatgcactttcatgccagaggggactgtgtgcagccagaatgccttgtacccgatgagtcctctgctccaagaatgcctccgggggtccactaagtcctgtgctcgtacactcgtatccgggtctttcgggaaccggttcattttatcacaggggaacctaatagccaattgtgcatcaatcctttgcaagtgttacacaacaggaacaatcattaatcaagaccctgacaagatcctaacatacattgctgccgatcactgcccggtggtcgaggtgaatggcgtgaccatccaagtcgggagcaggaggtatccggacgctgtgtacttgcacaggattgacctcggtcctcccatatctttggagaggttggacgtagggacaaatctggggaatgcaattgctaagttggaggatgccaaggaattgttggagtcatcggaccagatattgaggagtatgaaaggtttatcgagcactagtatagtttacatcctgattgcagtgtgtcttggaggattgatagggatccccgctttaatatgttgctgcagggggcgttgtaacaagaagggagaacaagttggtatgtcaagaccaggcctaaagcctgatcttacaggaacatcaaaatcctatgtaaggtcactctgatgataataggctggagcctcggtggccaagcttcttgccccttgggcctccccccagcccctcctccccttcctgcacccgtacccccgtggtctttgaataaagtctgagtgggcggc

SEQ ID NO: 39 - DNA, 1653 bp, synthetic construct
  misc_feature 1..1653: note = Synthetic Polynucleotide
  source 1..1653: mol_type = other DNA
atgggtctcaaggtgaacgtctctgtcatattcatggcagtactgttaactcttcaaacacccaccggtcaaatccattggggcaatctctctaagataggggtggtaggggtaggaagtgcaagctacaaagttatgactcgttccagccatcaatcattagtcataaagttaatgcccaatataactctcctcaacaattgcacgagggtagggattgcagaatacaggagactactgagaacagttctggaaccaattagagatgcacttaatgcaatgacccagaatataagaccggttcagagtgtagcttcaagtaggagacacaagagatttgcgggagttgtcctggcaggtgcggccctaggcgttgccacagctgctcaaataacagccggtattgcacttcaccagtccatgctgaactctcaagccatcgacaatctgagagcgagcctagaaactactaatcaggcaattgaggcaatcagacaagcagggcaggagatgatattggctgttcagggtgtccaagactacatcaataatgagctgataccgtctatgaatcaactatcttgtgatttaatcggccagaagctagggctcaaattgctcagatactatacagaaatcctgtcattatttggccccagcttacgggaccccatatctgcggagatatctatccaggctttgagctatgcgcttggaggagatatcaataaggtgttggaaaagctcggatacagtggaggtgatctactgggcatcttagagagcagaggaataaaggcccggataactcacgtcgacacagagtcctacttcattgtactcagtatagcctatccgacgctatccgagattaagggggtgattgtccaccggctagagggggtctcgtacaacataggctctcaagagtggtataccactgtgcccaagtatgttgcaacccaagggtaccttatctcgaattttgatgagtcatcatgcactttcatgccagaggggactgtgtgcagccagaatgccttgtacccgatgagtcctctgctccaagaatgcctccgggggtccactaagtcctgtgctcgtacactcgtatccgggtctttcgggaaccggttcattttatcacaggggaacctaatagccaattgtgcatcaatcctttgcaagtgttacacaacaggaacaatcattaatcaagaccctgacaagatcctaacatacattgctgccgatcactgcccggtggtcgaggtgaatggcgtgaccatccaagtcgggagcaggaggtatccggacgctgtgtacttgcacaggattgacctcggtcctcccatatctttggagaggttggacgtagggacaaatctggggaatgcaattgctaagttggaggatgccaaggaattgttggagtcatcggaccagatattgaggagtatgaaaggtttatcgagcactagtatagtttacatcctgattgcagtgtgtcttggaggattgatagggatccccgctttaatatgttgctgcagggggcgttgtaacaagaagggagaacaagttggtatgtcaagaccaggcctaaagcctgatcttacaggaacatcaaaatcctatgtaaggtcactctga

SEQ ID NO: 40 - DNA, 1925 bp, synthetic construct
  misc_feature 1..1925: note = Synthetic Polynucleotide
  source 1..1925: mol_type = other DNA
ggggaaataagagagaaaagaagagtaagaagaaatataagagccaccatgggtctcaaggtgaacgtctctgtcatattcatggcagtactgttaactcttcaaacacccaccggtcaaatccattggggcaatctctctaagataggggtggtaggggtaggaagtgcaagctacaaagttatgactcgttccagccatcaatcattagtcataaagttaatgcccaatataactctcctcaacaattgcacgagggtagggattgcagaatacaggagactactgagaacagttctggaaccaattagagatgcacttaatgcaatgacccagaatataagaccggttcagagtgtagcttcaagtaggagacacaagagatttgcgggagttgtcctggcaggtgcggccctaggcgttgccacagctgctcaaataacagccggtattgcacttcaccagtccatgctgaactctcaagccatcgacaatctgagagcgagcctagaaactactaatcaggcaattgaggcaatcagacaagcagggcaggagatgatattggctgttcagggtgtccaagactacatcaataatgagctgataccgtctatgaatcaactatcttgtgatttaatcggccagaagctagggctcaaattgctcagatactatacagaaatcctgtcattatttggccccagcttacgggaccccatatctgcggagatatctatccaggctttgagctatgcgcttggaggagatatcaataaggtgttggaaaagctcggatacagtggaggtgatctactgggcatcttagagagcagaggaataaaggcccggataactcacgtcgacacagagtcctacttcattgtactcagtatagcctatccgacgctatccgagattaagggggtgattgtccaccggctagagggggtctcgtacaacataggctctcaagagtggtataccactgtgcccaagtatgttgcaacccaagggtaccttatctcgaattttgatgagtcatcatgcactttcatgccagaggggactgtgtgcagccagaatgccttgtacccgatgagtcctctgctccaagaatgcctccgggggtccactaagtcctgtgctcgtacactcgtatccgggtctttcgggaaccggttcattttatcacaggggaacctaatagccaattgtgcatcaatcctttgcaagtgttacacaacaggaacaatcattaatcaagaccctgacaagatcctaacatacattgctgccgatcactgcccggtggtcgaggtgaatggcgtgaccatccaagtcgggagcaggaggtatccggacgctgtgtacttgcacaggattgacctcggtcctcccatatctttggagaggttggacgtagggacaaatctggggaatgcaattgctaagttggaggatgccaaggaattgttggagtcatcggaccagatattgaggagtatgaaaggtttatcgagcactagtatagtttacatcctgattgcagtgtgtcttggaggattgatagggatccccgctttaatatgttgctgcagggggcgttgtaacaagaagggagaacaagttggtatgtcaagaccaggcctaaagcctgatcttacaggaacatcaaaatcctatgtaaggtcactctgatgataataggctggagcctcggtggccaagcttcttgccccttgggcctccccccagcccctcctccccttcctgcacccgtacccccgtggtctttgaataaagtctgagtgggcggcaaaaaaaaaaaaaaaaaaaaaaaaaaaaaaaaaaaaaaaaaaaaaaaaaaaaaaaaaaaaaaaaaaaaaaaaaaaaaaaaaaaaaaaaaaaaaaaaaaaatctag

SEQ ID NO: 41 - DNA, 2065 bp, synthetic construct
  misc_feature 1..2065: note = Synthetic Polynucleotide
  source 1..2065: mol_type = other DNA
tcaagcttttggaccctcgtacagaagctaatacgactcactatagggaaataagagagaaaagaagagtaagaagaaatataagagccaccatgtcaccgcaacgagaccggataaatgccttctacaaagataacccttatcccaagggaagtaggatagttattaacagagaacatcttatgattgacagaccctatgttctgctggctgttctgttcgtcatgtttctgagcttgatcggattgctggcaattgcaggcattagacttcatcgggcagccatctacaccgcggagatccataaaagcctcagtaccaatctggatgtgactaactccatcgagcatcaggtcaaggacgtgctgacaccactctttaaaatcatcggggatgaagtgggcctgagaacacctcagagattcactgacctagtgaaattcatctcggacaagattaaattccttaatccggatagggagtacgacttcagagatctcacttggtgcatcaacccgccagagaggatcaaactagattatgatcaatactgtgcagatgtggctgctgaagagctcatgaatgcattggtgaactcaactctactggagaccagaacaaccactcagttcctagctgtctcaaagggaaactgctcagggcccactacaatcagaggtcaattctcaaacatgtcgctgtccttgttggacttgtacttaggtcgaggttacaatgtgtcatctatagtcactatgacatcccagggaatgtatgggggaacctacctagttgaaaagcctaatctgaacagcaaagggtcagagttgtcacaactgagcatgtaccgagtgtttgaagtaggtgtgatcagaaacccgggtttgggggctccggtgttccatatgacaaactattttgagcaaccagtcagtaatggtctcggcaactgtatggtggctttgggggagctcaaactcgcagccctttgtcacggggacgattctatcataattccctatcagggatcagggaaaggtgtcagcttccagctcgtcaagctgggtgtctggaaatccccaaccgacatgcaatcctgggtccccttatcaacggatgatccagtggtagacaggctttacctctcatctcacagaggtgtcatcgctgacaatcaagcaaaatgggctgtcccgacaacacgaacagatgacaagttgcgaatggagacatgcttccagcaggcgtgtaaaggtaaaatccaagcactctgcgagaatcccgagtgggtaccattgaaggataacaggattccttcatacggggtcctgtctgttgatctgagtctgacggttgagcttaaaatcaaaattgcttcgggattcgggccattgatcacacacggctcagggatggacctatacaaatccaactgcaacaatgtgtattggctgactattccgccaatgagaaatctagccttaggcgtaatcaacacattggagtggataccgagattcaaggttagtcccaacctcttcactgtcccaattaaggaagcaggcgaagactgccatgccccaacatacctacctgcggaggtggacggtgatgtcaaactcagttccaacctggtgattctacctggtcaagatctccaatatgttttggcaacctacgatacctccagggttgagcatgctgtggtttattacgtttacagcccaagccgctcattttcttacttttatccttttaggttgcctataaagggggtcccaatcgaactacaagtggaatgcttcacatgggatcaaaaactctggtgccgtcacttctgtgtgcttgcggactcagaatccggtggacttatcactcactctgggatggtgggcatgggagtcagctgcacagctacccgggaagatggaaccaatcgcagataatgataataggctggagcctcggtggccaagcttcttgccccttgggcctccccccagcccctcctccccttcctgcacccgtacccccgtggtctttgaataaagtctgagtgggcggc

SEQ ID NO: 42 - DNA, 1854 bp, synthetic construct
  misc_feature 1..1854: note = Synthetic Polynucleotide
  source 1..1854: mol_type = other DNA
atgtcaccgcaacgagaccggataaatgccttctacaaagataacccttatcccaagggaagtaggatagttattaacagagaacatcttatgattgacagaccctatgttctgctggctgttctgttcgtcatgtttctgagcttgatcggattgctggcaattgcaggcattagacttcatcgggcagccatctacaccgcggagatccataaaagcctcagtaccaatctggatgtgactaactccatcgagcatcaggtcaaggacgtgctgacaccactctttaaaatcatcggggatgaagtgggcctgagaacacctcagagattcactgacctagtgaaattcatctcggacaagattaaattccttaatccggatagggagtacgacttcagagatctcacttggtgcatcaacccgccagagaggatcaaactagattatgatcaatactgtgcagatgtggctgctgaagagctcatgaatgcattggtgaactcaactctactggagaccagaacaaccactcagttcctagctgtctcaaagggaaactgctcagggcccactacaatcagaggtcaattctcaaacatgtcgctgtccttgttggacttgtacttaggtcgaggttacaatgtgtcatctatagtcactatgacatcccagggaatgtatgggggaacctacctagttgaaaagcctaatctgaacagcaaagggtcagagttgtcacaactgagcatgtaccgagtgtttgaagtaggtgtgatcagaaacccgggtttgggggctccggtgttccatatgacaaactattttgagcaaccagtcagtaatggtctcggcaactgtatggtggctttgggggagctcaaactcgcagccctttgtcacggggacgattctatcataattccctatcagggatcagggaaaggtgtcagcttccagctcgtcaagctgggtgtctggaaatccccaaccgacatgcaatcctgggtccccttatcaacggatgatccagtggtagacaggctttacctctcatctcacagaggtgtcatcgctgacaatcaagcaaaatgggctgtcccgacaacacgaacagatgacaagttgcgaatggagacatgcttccagcaggcgtgtaaaggtaaaatccaagcactctgcgagaatcccgagtgggtaccattgaaggataacaggattccttcatacggggtcctgtctgttgatctgagtctgacggttgagcttaaaatcaaaattgcttcgggattcgggccattgatcacacacggctcagggatggacctatacaaatccaactgcaacaatgtgtattggctgactattccgccaatgagaaatctagccttaggcgtaatcaacacattggagtggataccgagattcaaggttagtcccaacctcttcactgtcccaattaaggaagcaggcgaagactgccatgccccaacatacctacctgcggaggtggacggtgatgtcaaactcagttccaacctggtgattctacctggtcaagatctccaatatgttttggcaacctacgatacctccagggttgagcatgctgtggtttattacgtttacagcccaagccgctcattttcttacttttatccttttaggttgcctataaagggggtcccaatcgaactacaagtggaatgcttcacatgggatcaaaaactctggtgccgtcacttctgtgtgcttgcggactcagaatccggtggacttatcactcactctgggatggtgggcatgggagtcagctgcacagctacccgggaagatggaaccaatcgcagataa

SEQ ID NO: 43 - DNA, 2126 bp, synthetic construct
  misc_feature 1..2126: note = Synthetic Polynucleotide
  source 1..2126: mol_type = other DNA
ggggaaataagagagaaaagaagagtaagaagaaatataagagccaccatgtcaccgcaacgagaccggataaatgccttctacaaagataacccttatcccaagggaagtaggatagttattaacagagaacatcttatgattgacagaccctatgttctgctggctgttctgttcgtcatgtttctgagcttgatcggattgctggcaattgcaggcattagacttcatcgggcagccatctacaccgcggagatccataaaagcctcagtaccaatctggatgtgactaactccatcgagcatcaggtcaaggacgtgctgacaccactctttaaaatcatcggggatgaagtgggcctgagaacacctcagagattcactgacctagtgaaattcatctcggacaagattaaattccttaatccggatagggagtacgacttcagagatctcacttggtgcatcaacccgccagagaggatcaaactagattatgatcaatactgtgcagatgtggctgctgaagagctcatgaatgcattggtgaactcaactctactggagaccagaacaaccactcagttcctagctgtctcaaagggaaactgctcagggcccactacaatcagaggtcaattctcaaacatgtcgctgtccttgttggacttgtacttaggtcgaggttacaatgtgtcatctatagtcactatgacatcccagggaatgtatgggggaacctacctagttgaaaagcctaatctgaacagcaaagggtcagagttgtcacaactgagcatgtaccgagtgtttgaagtaggtgtgatcagaaacccgggtttgggggctccggtgttccatatgacaaactattttgagcaaccagtcagtaatggtctcggcaactgtatggtggctttgggggagctcaaactcgcagccctttgtcacggggacgattctatcataattccctatcagggatcagggaaaggtgtcagcttccagctcgtcaagctgggtgtctggaaatccccaaccgacatgcaatcctgggtccccttatcaacggatgatccagtggtagacaggctttacctctcatctcacagaggtgtcatcgctgacaatcaagcaaaatgggctgtcccgacaacacgaacagatgacaagttgcgaatggagacatgcttccagcaggcgtgtaaaggtaaaatccaagcactctgcgagaatcccgagtgggtaccattgaaggataacaggattccttcatacggggtcctgtctgttgatctgagtctgacggttgagcttaaaatcaaaattgcttcgggattcgggccattgatcacacacggctcagggatggacctatacaaatccaactgcaacaatgtgtattggctgactattccgccaatgagaaatctagccttaggcgtaatcaacacattggagtggataccgagattcaaggttagtcccaacctcttcactgtcccaattaaggaagcaggcgaagactgccatgccccaacatacctacctgcggaggtggacggtgatgtcaaactcagttccaacctggtgattctacctggtcaagatctccaatatgttttggcaacctacgatacctccagggttgagcatgctgtggtttattacgtttacagcccaagccgctcattttcttacttttatccttttaggttgcctataaagggggtcccaatcgaactacaagtggaatgcttcacatgggatcaaaaactctggtgccgtcacttctgtgtgcttgcggactcagaatccggtggacttatcactcactctgggatggtgggcatgggagtcagctgcacagctacccgggaagatggaaccaatcgcagataatgataataggctggagcctcggtggccaagcttcttgccccttgggcctccccccagcccctcctccccttcctgcacccgtacccccgtggtctttgaataaagtctgagtgggcggcaaaaaaaaaaaaaaaaaaaaaaaaaaaaaaaaaaaaaaaaaaaaaaaaaaaaaaaaaaaaaaaaaaaaaaaaaaaaaaaaaaaaaaaaaaaaaaaaaaaatctag

SEQ ID NO: 44 - DNA, 2065 bp, synthetic construct
  misc_feature 1..2065: note = Synthetic Polynucleotide
  source 1..2065: mol_type = other DNA
tcaagcttttggaccctcgtacagaagctaatacgactcactatagggaaataagagagaaaagaagagtaagaagaaatataagagccaccatgtcaccacaacgagaccggataaatgccttctacaaagacaacccccatcctaagggaagtaggatagttattaacagagaacatcttatgattgatagaccttatgttttgctggctgttctattcgtcatgtttctgagcttgatcgggttgctagccattgcaggcattagacttcatcgggcagccatctacaccgcagagatccataaaagcctcagcaccaatctggatgtaactaactcaatcgagcatcaggttaaggacgtgctgacaccactcttcaagatcatcggtgatgaagtgggcttgaggacacctcagagattcactgacctagtgaagttcatctctgacaagattaaattccttaatccggacagggaatacgacttcagagatctcacttggtgtatcaacccgccagagagaatcaaattggattatgatcaatactgtgcagatgtggctgctgaagaactcatgaatgcattggtgaactcaactctactggagaccagggcaaccaatcagttcctagctgtctcaaagggaaactgctcagggcccactacaatcagaggccaattctcaaacatgtcgctgtccctgttggacttgtatttaagtcgaggttacaatgtgtcatctatagtcactatgacatcccagggaatgtacgggggaacttacctagtggaaaagcctaatctgagcagcaaagggtcagagttgtcacaactgagcatgcaccgagtgtttgaagtaggtgttatcagaaatccgggtttgggggctccggtattccatatgacaaactatcttgagcaaccagtcagtaatgatttcagcaactgcatggtggctttgggggagctcaagttcgcagccctctgtcacagggaagattctatcacaattccctatcagggatcagggaaaggtgtcagcttccagcttgtcaagctaggtgtctggaaatccccaaccgacatgcaatcctgggtccccctatcaacggatgatccagtgatagacaggctttacctctcatctcacagaggcgttatcgctgacaatcaagcaaaatgggctgtcccgacaacacggacagatgacaagttgcgaatggagacatgcttccagcaggcgtgtaagggtaaaatccaagcactttgcgagaatcccgagtggacaccattgaaggataacaggattccttcatacggggtcttgtctgttgatctgagtctgacagttgagcttaaaatcaaaattgtttcaggattcgggccattgatcacacacggttcagggatggacctatacaaatccaaccacaacaatatgtattggctgactatcccgccaatgaagaacctggccttaggtgtaatcaacacattggagtggataccgagattcaaggttagtcccaacctcttcactgttccaattaaggaagcaggcgaggactgccatgccccaacatacctacctgcggaggtggatggtgatgtcaaactcagttccaatctggtgattctacctggtcaagatctccaatatgttctggcaacctacgatacttccagagttgaacatgctgtagtttattacgtttacagcccaagccgctcattttcttacttttatccttttaggttgcctgtaaggggggtccccattgaattacaagtggaatgcttcacatgggaccaaaaactctggtgccgtcacttctgtgtgcttgcggactcagaatctggtggacatatcactcactctgggatggtgggcatgggagtcagctgcacagccactcgggaagatggaaccagccgcagatagtgataataggctggagcctcggtggccaagcttcttgccccttgggcctccccccagcccctcctccccttcctgcacccgtacccccgtggtctttgaataaagtctgagtgggcggc

SEQ ID NO: 45 - DNA, 1854 bp, synthetic construct
  misc_feature 1..1854: note = Synthetic Polynucleotide
  source 1..1854: mol_type = other DNA
atgtcaccacaacgagaccggataaatgccttctacaaagacaacccccatcctaagggaagtaggatagttattaacagagaacatcttatgattgatagaccttatgttttgctggctgttctattcgtcatgtttctgagcttgatcgggttgctagccattgcaggcattagacttcatcgggcagccatctacaccgcagagatccataaaagcctcagcaccaatctggatgtaactaactcaatcgagcatcaggttaaggacgtgctgacaccactcttcaagatcatcggtgatgaagtgggcttgaggacacctcagagattcactgacctagtgaagttcatctctgacaagattaaattccttaatccggacagggaatacgacttcagagatctcacttggtgtatcaacccgccagagagaatcaaattggattatgatcaatactgtgcagatgtggctgctgaagaactcatgaatgcattggtgaactcaactctactggagaccagggcaaccaatcagttcctagctgtctcaaagggaaactgctcagggcccactacaatcagaggccaattctcaaacatgtcgctgtccctgttggacttgtatttaagtcgaggttacaatgtgtcatctatagtcactatgacatcccagggaatgtacgggggaacttacctagtggaaaagcctaatctgagcagcaaagggtcagagttgtcacaactgagcatgcaccgagtgtttgaagtaggtgttatcagaaatccgggtttgggggctccggtattccatatgacaaactatcttgagcaaccagtcagtaatgatttcagcaactgcatggtggctttgggggagctcaagttcgcagccctctgtcacagggaagattctatcacaattccctatcagggatcagggaaaggtgtcagcttccagcttgtcaagctaggtgtctggaaatccccaaccgacatgcaatcctgggtccccctatcaacggatgatccagtgatagacaggctttacctctcatctcacagaggcgttatcgctgacaatcaagcaaaatgggctgtcccgacaacacggacagatgacaagttgcgaatggagacatgcttccagcaggcgtgtaagggtaaaatccaagcactttgcgagaatcccgagtggacaccattgaaggataacaggattccttcatacggggtcttgtctgttgatctgagtctgacagttgagcttaaaatcaaaattgtttcaggattcgggccattgatcacacacggttcagggatggacctatacaaatccaaccacaacaatatgtattggctgactatcccgccaatgaagaacctggccttaggtgtaatcaacacattggagtggataccgagattcaaggttagtcccaacctcttcactgttccaattaaggaagcaggcgaggactgccatgccccaacatacctacctgcggaggtggatggtgatgtcaaactcagttccaatctggtgattctacctggtcaagatctccaatatgttctggcaacctacgatacttccagagttgaacatgctgtagtttattacgtttacagcccaagccgctcattttcttacttttatccttttaggttgcctgtaaggggggtccccattgaattacaagtggaatgcttcacatgggaccaaaaactctggtgccgtcacttctgtgtgcttgcggactcagaatctggtggacatatcactcactctgggatggtgggcatgggagtcagctgcacagccactcgggaagatggaaccagccgcagatag

SEQ ID NO: 46 - DNA, 2126 bp, synthetic construct
  misc_feature 1..2126: note = Synthetic Polynucleotide
  source 1..2126: mol_type = other DNA
ggggaaataagagagaaaagaagagtaagaagaaatataagagccaccatgtcaccacaacgagaccggataaatgccttctacaaagacaacccccatcctaagggaagtaggatagttattaacagagaacatcttatgattgatagaccttatgttttgctggctgttctattcgtcatgtttctgagcttgatcgggttgctagccattgcaggcattagacttcatcgggcagccatctacaccgcagagatccataaaagcctcagcaccaatctggatgtaactaactcaatcgagcatcaggttaaggacgtgctgacaccactcttcaagatcatcggtgatgaagtgggcttgaggacacctcagagattcactgacctagtgaagttcatctctgacaagattaaattccttaatccggacagggaatacgacttcagagatctcacttggtgtatcaacccgccagagagaatcaaattggattatgatcaatactgtgcagatgtggctgctgaagaactcatgaatgcattggtgaactcaactctactggagaccagggcaaccaatcagttcctagctgtctcaaagggaaactgctcagggcccactacaatcagaggccaattctcaaacatgtcgctgtccctgttggacttgtatttaagtcgaggttacaatgtgtcatctatagtcactatgacatcccagggaatgtacgggggaacttacctagtggaaaagcctaatctgagcagcaaagggtcagagttgtcacaactgagcatgcaccgagtgtttgaagtaggtgttatcagaaatccgggtttgggggctccggtattccatatgacaaactatcttgagcaaccagtcagtaatgatttcagcaactgcatggtggctttgggggagctcaagttcgcagccctctgtcacagggaagattctatcacaattccctatcagggatcagggaaaggtgtcagcttccagcttgtcaagctaggtgtctggaaatccccaaccgacatgcaatcctgggtccccctatcaacggatgatccagtgatagacaggctttacctctcatctcacagaggcgttatcgctgacaatcaagcaaaatgggctgtcccgacaacacggacagatgacaagttgcgaatggagacatgcttccagcaggcgtgtaagggtaaaatccaagcactttgcgagaatcccgagtggacaccattgaaggataacaggattccttcatacggggtcttgtctgttgatctgagtctgacagttgagcttaaaatcaaaattgtttcaggattcgggccattgatcacacacggttcagggatggacctatacaaatccaaccacaacaatatgtattggctgactatcccgccaatgaagaacctggccttaggtgtaatcaacacattggagtggataccgagattcaaggttagtcccaacctcttcactgttccaattaaggaagcaggcgaggactgccatgccccaacatacctacctgcggaggtggatggtgatgtcaaactcagttccaatctggtgattctacctggtcaagatctccaatatgttctggcaacctacgatacttccagagttgaacatgctgtagtttattacgtttacagcccaagccgctcattttcttacttttatccttttaggttgcctgtaaggggggtccccattgaattacaagtggaatgcttcacatgggaccaaaaactctggtgccgtcacttctgtgtgcttgcggactcagaatctggtggacatatcactcactctgggatggtgggcatgggagtcagctgcacagccactcgggaagatggaaccagccgcagatagtgataataggctggagcctcggtggccaagcttcttgccccttgggcctccccccagcccctcctccccttcctgcacccgtacccccgtggtctttgaataaagtctgagtgggcggcaaaaaaaaaaaaaaaaaaaaaaaaaaaaaaaaaaaaaaaaaaaaaaaaaaaaaaaaaaaaaaaaaaaaaaaaaaaaaaaaaaaaaaaaaaaaaaaaaaaatctag

SEQ ID NO: 47 - protein, 550 aa, synthetic construct
  REGION 1..550: note = Synthetic Polypeptide
MGLKVNVSAVFMAVLLTLQTPAGQIHWGNLSKIGVVGIGSASYKVMTRSSHQSLVIKLMPNITLLNNCTRVEIAEYRRLLRTVLEPIRDALNAMTQNIRPVQSVASSRRHKRFAGVVLAGAALGVATAAQITAGIALHRSMLNSQAIDNLRASLETTNQAIEAIRQAGQEMILAVQGVQDYINNELIPSMNQLSCDLIGQKLGLKLLRYYTEILSLFGPSLRDPISAEISIQALSYALGGDINKVLEKLGYSGGDLLGILESRGIKARITHVDTESYFIVLSIAYPTLSEIKGVIVHRLEGVSYNIGSQEWYTTVPKYVATQGYLISNFDESSCTFMPEGTVCSQNALYPMSPLLQECLRGSTKSCARTLVSGSFGNRFILSQGNLIANCASILCKCYTTGTIINQDPDKILTYIAADRCPVVEVNGVTIQVGSRRYPDAVYLHRIDLGPPISLERLDVGTNLGNAIAKLEDAKELLESSDQILRSMKGLSSTSIVYILIAVCLGGLIGIPTLICCCRGRCNKKGEQVGMSRPGLKPDLTGTSKSYVRSL

SEQ ID NO: 48 - protein, 550 aa, synthetic construct
  REGION 1..550: note = Synthetic Polypeptide
MGLKVNVSVIFMAVLLTLQTPTGQIHWGNLSKIGVVGVGSASYKVMTRSSHQSLVIKLMPNITLLNNCTRVGIAEYRRLLRTVLEPIRDALNAMTQNIRPVQSVASSRRHKRFAGVVLAGAALGVATAAQITAGIALHQSMLNSQAIDNLRASLETTNQAIEAIRQAGQEMILAVQGVQDYINNELIPSMNQLSCDLIGQKLGLKLLRYYTEILSLFGPSLRDPISAEISIQALSYALGGDINKVLEKLGYSGGDLLGILESRGIKARITHVDTESYFIVLSIAYPTLSEIKGVIVHRLEGVSYNIGSQEWYTTVPKYVATQGYLISNFDESSCTFMPEGTVCSQNALYPMSPLLQECLRGSTKSCARTLVSGSFGNRFILSQGNLIANCASILCKCYTTGTIINQDPDKILTYIAADHCPVVEVNGVTIQVGSRRYPDAVYLHRIDLGPPISLERLDVGTNLGNAIAKLEDAKELLESSDQILRSMKGLSSTSIVYILIAVCLGGLIGIPALICCCRGRCNKKGEQVGMSRPGLKPDLTGTSKSYVRSL

SEQ ID NO: 49 - protein, 617 aa, synthetic construct
  REGION 1..617: note = Synthetic Polypeptide
MSPQRDRINAFYKDNPYPKGSRIVINREHLMIDRPYVLLAVLFVMFLSLIGLLAIAGIRLHRAAIYTAEIHKSLSTNLDVTNSIEHQVKDVLTPLFKIIGDEVGLRTPQRFTDLVKFISDKIKFLNPDREYDFRDLTWCINPPERIKLDYDQYCADVAAEELMNALVNSTLLETRTTTQFLAVSKGNCSGPTTIRGQFSNMSLSLLDLYLGRGYNVSSIVTMTSQGMYGGTYLVEKPNLNSKGSELSQLSMYRVFEVGVIRNPGLGAPVFHMTNYFEQPVSNGLGNCMVALGELKLAALCHGDDSIIIPYQGSGKGVSFQLVKLGVWKSPTDMQSWVPLSTDDPVVDRLYLSSHRGVIADNQAKWAVPTTRTDDKLRMETCFQQACKGKIQALCENPEWVPLKDNRIPSYGVLSVDLSLTVELKIKIASGFGPLITHGSGMDLYKSNCNNVYWLTIPPMRNLALGVINTLEWIPRFKVSPNLFTVPIKEAGEDCHAPTYLPAEVDGDVKLSSNLVILPGQDLQYVLATYDTSRVEHAVVYYVYSPSRSFSYFYPFRLPIKGVPIELQVECFTWDQKLWCRHFCVLADSESGGLITHSGMVGMGVSCTATREDGTNRR

SEQ ID NO: 50 - protein, 617 aa, synthetic construct
  REGION 1..617: note = Synthetic Polypeptide
MSPQRDRINAFYKDNPHPKGSRIVINREHLMIDRPYVLLAVLFVMFLSLIGLLAIAGIRLHRAAIYTAEIHKSLSTNLDVTNSIEHQVKDVLTPLFKIIGDEVGLRTPQRFTDLVKFISDKIKFLNPDREYDFRDLTWCINPPERIKLDYDQYCADVAAEELMNALVNSTLLETRATNQFLAVSKGNCSGPTTIRGQFSNMSLSLLDLYLSRGYNVSSIVTMTSQGMYGGTYLVEKPNLSSKGSELSQLSMHRVFEVGVIRNPGLGAPVFHMTNYLEQPVSNDFSNCMVALGELKFAALCHREDSITIPYQGSGKGVSFQLVKLGVWKSPTDMQSWVPLSTDDPVIDRLYLSSHRGVIADNQAKWAVPTTRTDDKLRMETCFQQACKGKIQALCENPEWTPLKDNRIPSYGVLSVDLSLTVELKIKIVSGFGPLITHGSGMDLYKSNHNNMYWLTIPPMKNLALGVINTLEWIPRFKVSPNLFTVPIKEAGEDCHAPTYLPAEVDGDVKLSSNLVILPGQDLQYVLATYDTSRVEHAVVYYVYSPSRSFSYFYPFRLPVRGVPIELQVECFTWDQKLWCRHFCVLADSESGGHITHSGMVGMGVSCTATREDGTSRR

SEQ ID NO: 51 - DNA, 1729 bp, synthetic construct
  misc_feature 1..1729: note = Synthetic Polynucleotide
  source 1..1729: mol_type = other DNA
tcaagcttttggaccctcgtacagaagctaatacgactcactatagggaaataagagagaaaagaagagtaagaagaaatataagagccaccatggcacaagtcattaatacaaacagcctgtcgctgttgacccagaataacctgaacaaatcccagtccgcactgggcactgctatcgagcgtttgtcttccggtctgcgtatcaacagcgcgaaagacgatgcggcaggacaggcgattgctaaccgttttaccgcgaacatcaaaggtctgactcaggcttcccgtaacgctaacgacggtatctccattgcgcagaccactgaaggcgcgctgaacgaaatcaacaacaacctgcagcgtgtgcgtgaactggcggttcagtctgcgaatggtactaactcccagtctgacctcgactccatccaggctgaaatcacccagcgcctgaacgaaatcgaccgtgtatccggccagactcagttcaacggcgtgaaagtcctggcgcaggacaacaccctgaccatccaggttggtgccaacgacggtgaaactatcgatattgatttaaaagaaatcagctctaaaacactgggacttgataagcttaatgtccaagatgcctacaccccgaaagaaactgctgtaaccgttgataaaactacctataaaaatggtacagatcctattacagcccagagcaatactgatatccaaactgcaattggcggtggtgcaacgggggttactggggctgatatcaaatttaaagatggtcaatactatttagatgttaaaggcggtgcttctgctggtgtttataaagccacttatgatgaaactacaaagaaagttaatattgatacgactgataaaactccgttggcaactgcggaagctacagctattcggggaacggccactataacccacaaccaaattgctgaagtaacaaaagagggtgttgatacgaccacagttgcggctcaacttgctgcagcaggggttactggcgccgataaggacaatactagccttgtaaaactatcgtttgaggataaaaacggtaaggttattgatggtggctatgcagtgaaaatgggcgacgatttctatgccgctacatatgatgagaaaacaggtgcaattactgctaaaaccactacttatacagatggtactggcgttgctcaaactggagctgtgaaatttggtggcgcaaatggtaaatctgaagttgttactgctaccgatggtaagacttacttagcaagcgaccttgacaaacataacttcagaacaggcggtgagcttaaagaggttaatacagataagactgaaaacccactgcagaaaattgatgctgccttggcacaggttgatacacttcgttctgacctgggtgcggttcagaaccgtttcaactccgctatcaccaacctgggcaataccgtaaataacctgtcttctgcccgtagccgtatcgaagattccgactacgcaaccgaagtctccaacatgtctcgcgcgcagattctgcagcaggccggtacctccgttctggcgcaggcgaaccaggttccgcaaaacgtcctctctttactgcgttgataataggctggagcctcggtggccatgcttcttgccccttgggcctccccccagcccctcctccccttcctgcacccgtacccccgtggtctttgaataaagtctgagtgggcggc

SEQ ID NO: 52 - DNA, 1518 bp, synthetic construct
  misc_feature 1..1518: note = Synthetic Polynucleotide
  source 1..1518: mol_type = other DNA
atggcacaagtcattaatacaaacagcctgtcgctgttgacccagaataacctgaacaaatcccagtccgcactgggcactgctatcgagcgtttgtcttccggtctgcgtatcaacagcgcgaaagacgatgcggcaggacaggcgattgctaaccgttttaccgcgaacatcaaaggtctgactcaggcttcccgtaacgctaacgacggtatctccattgcgcagaccactgaaggcgcgctgaacgaaatcaacaacaacctgcagcgtgtgcgtgaactggcggttcagtctgcgaatggtactaactcccagtctgacctcgactccatccaggctgaaatcacccagcgcctgaacgaaatcgaccgtgtatccggccagactcagttcaacggcgtgaaagtcctggcgcaggacaacaccctgaccatccaggttggtgccaacgacggtgaaactatcgatattgatttaaaagaaatcagctctaaaacactgggacttgataagcttaatgtccaagatgcctacaccccgaaagaaactgctgtaaccgttgataaaactacctataaaaatggtacagatcctattacagcccagagcaatactgatatccaaactgcaattggcggtggtgcaacgggggttactggggctgatatcaaatttaaagatggtcaatactatttagatgttaaaggcggtgcttctgctggtgtttataaagccacttatgatgaaactacaaagaaagttaatattgatacgactgataaaactccgttggcaactgcggaagctacagctattcggggaacggccactataacccacaaccaaattgctgaagtaacaaaagagggtgttgatacgaccacagttgcggctcaacttgctgcagcaggggttactggcgccgataaggacaatactagccttgtaaaactatcgtttgaggataaaaacggtaaggttattgatggtggctatgcagtgaaaatgggcgacgatttctatgccgctacatatgatgagaaaacaggtgcaattactgctaaaaccactacttatacagatggtactggcgttgctcaaactggagctgtgaaatttggtggcgcaaatggtaaatctgaagttgttactgctaccgatggtaagacttacttagcaagcgaccttgacaaacataacttcagaacaggcggtgagcttaaagaggttaatacagataagactgaaaacccactgcagaaaattgatgctgccttggcacaggttgatacacttcgttctgacctgggtgcggttcagaaccgtttcaactccgctatcaccaacctgggcaataccgtaaataacctgtcttctgcccgtagccgtatcgaagattccgactacgcaaccgaagtctccaacatgtctcgcgcgcagattctgcagcaggccggtacctccgttctggcgcaggcgaaccaggttccgcaaaacgtcctctctttactgcgt

SEQ ID NO: 53 - RNA, 1790 nt, synthetic construct
  misc_feature 1..1790: note = Synthetic Polynucleotide
  source 1..1790: mol_type = other RNA
ggggaaataagagagaaaagaagagtaagaagaaatataagagccaccatggcacaagtcattaatacaaacagcctgtcgctgttgacccagaataacctgaacaaatcccagtccgcactgggcactgctatcgagcgtttgtcttccggtctgcgtatcaacagcgcgaaagacgatgcggcaggacaggcgattgctaaccgttttaccgcgaacatcaaaggtctgactcaggcttcccgtaacgctaacgacggtatctccattgcgcagaccactgaaggcgcgctgaacgaaatcaacaacaacctgcagcgtgtgcgtgaactggcggttcagtctgcgaatggtactaactcccagtctgacctcgactccatccaggctgaaatcacccagcgcctgaacgaaatcgaccgtgtatccggccagactcagttcaacggcgtgaaagtcctggcgcaggacaacaccctgaccatccaggttggtgccaacgacggtgaaactatcgatattgatttaaaagaaatcagctctaaaacactgggacttgataagcttaatgtccaagatgcctacaccccgaaagaaactgctgtaaccgttgataaaactacctataaaaatggtacagatcctattacagcccagagcaatactgatatccaaactgcaattggcggtggtgcaacgggggttactggggctgatatcaaatttaaagatggtcaatactatttagatgttaaaggcggtgcttctgctggtgtttataaagccacttatgatgaaactacaaagaaagttaatattgatacgactgataaaactccgttggcaactgcggaagctacagctattcggggaacggccactataacccacaaccaaattgctgaagtaacaaaagagggtgttgatacgaccacagttgcggctcaacttgctgcagcaggggttactggcgccgataaggacaatactagccttgtaaaactatcgtttgaggataaaaacggtaaggttattgatggtggctatgcagtgaaaatgggcgacgatttctatgccgctacatatgatgagaaaacaggtgcaattactgctaaaaccactacttatacagatggtactggcgttgctcaaactggagctgtgaaatttggtggcgcaaatggtaaatctgaagttgttactgctaccgatggtaagacttacttagcaagcgaccttgacaaacataacttcagaacaggcggtgagcttaaagaggttaatacagataagactgaaaacccactgcagaaaattgatgctgccttggcacaggttgatacacttcgttctgacctgggtgcggttcagaaccgtttcaactccgctatcaccaacctgggcaataccgtaaataacctgtcttctgcccgtagccgtatcgaagattccgactacgcaaccgaagtctccaacatgtctcgcgcgcagattctgcagcaggccggtacctccgttctggcgcaggcgaaccaggttccgcaaaacgtcctctctttactgcgttgataataggctggagcctcggtggccatgcttcttgccccttgggcctccccccagcccctcctccccttcctgcacccgtacccccgtggtctttgaataaagtctgagtgggcggcaaaaaaaaaaaaaaaaaaaaaaaaaaaaaaaaaaaaaaaaaaaaaaaaaaaaaaaaaaaaaaaaaaaaaaaaaaaaaaaaaaaaaaaaaaaaaaaaaaaatctag

SEQ ID NO: 54 - protein, 506 aa, synthetic construct
  REGION 1..506: note = Synthetic Polypeptide
MAQVINTNSLSLLTQNNLNKSQSALGTAIERLSSGLRINSAKDDAAGQAIANRFTANIKGLTQASRNANDGISIAQTTEGALNEINNNLQRVRELAVQSANGTNSQSDLDSIQAEITQRLNEIDRVSGQTQFNGVKVLAQDNTLTIQVGANDGETIDIDLKEISSKTLGLDKLNVQDAYTPKETAVTVDKTTYKNGTDPITAQSNTDIQTAIGGGATGVTGADIKFKDGQYYLDVKGGASAGVYKATYDETTKKVNIDTTDKTPLATAEATAIRGTATITHNQIAEVTKEGVDTTTVAAQLAAAGVTGADKDNTSLVKLSFEDKNGKVIDGGYAVKMGDDFYAATYDEKTGAITAKTTTYTDGTGVAQTGAVKFGGANGKSEVVTATDGKTYLASDLDKHNFRTGGELKEVNTDKTENPLQKIDAALAQVDTLRSDLGAVQNRFNSAITNLGNTVNNLSSARSRIEDSDYATEVSNMSRAQILQQAGTSVLAQANQVPQNVLSLLR

SEQ ID NO: 55 - protein, 698 aa, synthetic construct
  REGION 1..698: note = Synthetic Polypeptide
MAQVINTNSLSLLTQNNLNKSQSALGTAIERLSSGLRINSAKDDAAGQAIANRFTANIKGLTQASRNANDGISIAQTTEGALNEINNNLQRVRELAVQSANSTNSQSDLDSIQAEITQRLNEIDRVSGQTQFNGVKVLAQDNTLTIQVGANDGETIDIDLKQINSQTLGLDTLNVQQKYKVSDTAATVTGYADTTIALDNSTFKASATGLGGTDQKIDGDLKFDDTTGKYYAKVTVTGGTGKDGYYEVSVDKTNGEVTLAGGATSPLTGGLPATATEDVKNVQVANADLTEAKAALTAAGVTGTASVVKMSYTDNNGKTIDGGLAVKVGDDYYSATQNKDGSISINTTKYTADDGTSKTALNKLGGADGKTEVVSIGGKTYAASKAEGHNFKAQPDLAEAAATTTENPLQKIDAALAQVDTLRSDLGAVQNRFNSAITNLGNTVNNLTSARSRIEDSDYATEVSNMSRAQILQQAGTSVLAQANQVPQNVLSLLRGGGGSGGGGSMMAPDPNANPNANPNANPNANPNANPNANPNANPNANPNANPNANPNANPNANPNANPNANPNANPNANPNANPNANPNANPNKNNQGNGQGHNMPNDPNRNVDENANANNAVKNNNNEEPSDKHIEQYLKKIKNSISTEWSPCSVTCGNGIQVRIKPGSANKPKDELDYENDIEKKICKMEKCSSVFNVVNS

SEQ ID NO: 56 - protein, 692 aa, synthetic construct
  REGION 1..692: note = Synthetic Polypeptide
MMAPDPNANPNANPNANPNANPNANPNANPNANPNANPNANPNANPNANPNANPNANPNANPNANPNANPNANPNANPNANPNKNNQGNGQGHNMPNDPNRNVDENANANNAVKNNNNEEPSDKHIEQYLKKIKNSISTEWSPCSVTCGNGIQVRIKPGSANKPKDELDYENDIEKKICKMEKCSSVFNVVNSRPVTMAQVINTNSLSLLTQNNLNKSQSALGTAIERLSSGLRINSAKDDAAGQAIANRFTANIKGLTQASRNANDGISIAQTTEGALNEINNNLQRVRELAVQSANSTNSQSDLDSIQAEITQRLNEIDRVSGQTQFNGVKVLAQDNTLTIQVGANDGETIDIDLKQINSQTLGLDTLNVQQKYKVSDTAATVTGYADTTIALDNSTFKASATGLGGTDQKIDGDLKFDDTTGKYYAKVTVTGGTGKDGYYEVSVDKTNGEVTLAGGATSPLTGGLPATATEDVKNVQVANADLTEAKAALTAAGVTGTASVVKMSYTDNNGKTIDGGLAVKVGDDYYSATQNKDGSISINTTKYTADDGTSKTALNKLGGADGKTEVVSIGGKTYAASKAEGHNFKAQPDLAEAAATTTENPLQKIDAALAQVDTLRSDLGAVQNRFNSAITNLGNTVNNLTSARSRIEDSDYATEVSNMSRAQILQQAGTSVLAQANQVPQNVLSLLR

SEQ ID NO: 57 - RNA, 1620 nt, Human metapneumovirus
  source 1..1620: mol_type = mRNA
atgagctggaaggtggtgattatcttcagcctgctgattacacctcaacacggcctgaaggagagctacctggaagagagctgctccaccatcaccgagggctacctgagcgtgctgcggaccggctggtacaccaacgtgttcaccctggaggtgggcgacgtggagaacctgacctgcagcgacggccctagcctgatcaagaccgagctggacctgaccaagagcgctctgagagagctgaagaccgtgtccgccgaccagctggccagagaggaacagatcgagaaccctcggcagagcagattcgtgctgggcgccatcgctctgggagtcgccgctgccgctgcagtgacagctggagtggccattgctaagaccatcagactggaaagcgaggtgacagccatcaacaatgccctgaagaagaccaacgaggccgtgagcaccctgggcaatggagtgagagtgctggccacagccgtgcgggagctgaaggacttcgtgagcaagaacctgaccagagccatcaacaagaacaagtgcgacatcgatgacctgaagatggccgtgagcttctcccagttcaacagacggttcctgaacgtggtgagacagttctccgacaacgctggaatcacacctgccattagcctggacctgatgaccgacgccgagctggctagagccgtgcccaacatgcccaccagcgctggccagatcaagctgatgctggagaacagagccatggtgcggagaaagggcttcggcatcctgattggggtgtatggaagctccgtgatctacatggtgcagctgcccatcttcggcgtgatcgacacaccctgctggatcgtgaaggccgctcctagctgctccgagaagaaaggaaactatgcctgtctgctgagagaggaccagggctggtactgccagaacgccggaagcacagtgtactatcccaacgagaaggactgcgagaccagaggcgaccacgtgttctgcgacaccgctgccggaatcaacgtggccgagcagagcaaggagtgcaacatcaacatcagcacaaccaactacccctgcaaggtgagcaccggacggcaccccatcagcatggtggctctgagccctctgggcgctctggtggcctgctataagggcgtgtcctgtagcatcggcagcaatcgggtgggcatcatcaagcagctgaacaagggatgctcctacatcaccaaccaggacgccgacaccgtgaccatcgacaacaccgtgtaccagctgagcaaggtggagggcgagcagcacgtgatcaagggcagacccgtgagctccagcttcgaccccatcaagttccctgaggaccagttcaacgtggccctggaccaggtgtttgagaacatcgagaacagccaggccctggtggaccagagcaacagaatcctgtccagcgctgagaagggcaacaccggcttcatcattgtgatcattctgatcgccgtgctgggcagctccatgatcctggtgagcatcttcatcattatcaagaagaccaagaaacccaccggagcccctcctgagctgagcggcgtgaccaacaatggcttcattccccacaactga

SEQ ID NO: 58 - RNA, 1620 nt, Human metapneumovirus
  source 1..1620: mol_type = mRNA
atgtcttggaaagtgatgatcatcatttcgttactcataacaccccagcacgggctaaaggagagttatttggaagaatcatgtagtactataactgagggatacctcagtgttttaagaacaggctggtacactaatgtcttcacattagaagttggtgatgttgaaaatcttacatgtactgatggacctagcttaatcaaaacagaacttgatctaacaaaaagtgctttaagggaactcaaaacagtctctgctgatcagttggcgagagaggagcaaattgaaaatcccagacaatcaagatttgtcttaggtgcgatagctctcggagttgctacagcagcagcagtcacagcaggcattgcaatagccaaaaccataaggcttgagagtgaggtgaatgcaattaaaggtgctctcaaacaaactaatgaagcagtatccacattagggaatggtgtgcgggtcctagccactgcagtgagagagctaaaagaatttgtgagcaaaaacctgactagtgcaatcaacaggaacaaatgtgacattgctgatctgaagatggctgtcagcttcagtcaattcaacagaagatttctaaatgttgtgcggcagttttcagacaatgcagggataacaccagcaatatcattggacctgatgactgatgctgagttggccagagctgtatcatacatgccaacatctgcagggcagataaaactgatgttggagaaccgcgcaatggtaaggagaaaaggatttggaatcctgataggggtctacggaagctctgtgatttacatggttcaattgccgatctttggtgtcatagatacaccttgttggatcatcaaggcagctccctcttgctcagaaaaaaacgggaattatgcttgcctcctaagagaggatcaagggtggtattgtaaaaatgcaggatctactgtttactacccaaatgaaaaagactgcgaaacaagaggtgatcatgttttttgtgacacagcagcagggatcaatgttgctgagcaatcaagagaatgcaacatcaacatatctactaccaactacccatgcaaagtcagcacaggaagacaccctataagcatggttgcactatcacctctcggtgctttggtggcttgctataaaggggtaagctgctcgattggcagcaattgggttggaatcatcaaacaattacccaaaggctgctcatacataaccaaccaggatgcagacactgtaacaattgacaataccgtgtatcaactaagcaaagttgaaggtgaacagcatgtaataaaagggagaccagtttcaagcagttttgatccaatcaagtttcctgaggatcagttcaatgttgcgcttgatcaagtcttcgaaagcattgagaacagtcaggcactagtggaccagtcaaacaaaattctaaacagtgcagaaaaaggaaacactggtttcattatcgtagtaattttggttgctgttcttggtctaaccatgatttcagtgagcatcatcatcataatcaagaaaacaaggaagcccacaggagcacctccagagctgaatggtgtcaccaacggcggtttcataccacatagttag

SEQ ID NO: 59 - RNA, 1620 nt, Human metapneumovirus
  source 1..1620: mol_type = mRNA
atgtcttggaaagtgatgattatcatttcgttactcataacacctcagcatggactaaaagaaagttatttagaagaatcatgtagtactataactgaaggatatctcagtgttttaagaacaggttggtacaccaatgtctttacattagaagttggtgatgttgaaaatcttacatgtactgatggacctagcttaatcaaaacagaacttgacctaaccaaaagtgctttaagagaactcaaaacagtttctgctgatcagttagcgagagaagaacaaattgaaaatcccagacaatcaaggtttgtcctaggtgcaatagctcttggagttgccacagcagcagcagtcacagcaggcattgcaatagccaaaactataaggcttgagagtgaagtgaatgcaatcaaaggtgctctcaaaacaaccaatgaggcagtatcaacactaggaaatggagtgcgggtcctagccactgcagtaagagagctgaaagaatttgtgagcaaaaacctgactagtgcgatcaacaagaacaagtgtgacattgctgatttgaagatggctgtcagcttcagtcagttcaacagaagattcctaaatgttgtgcggcagttttcagacaatgcagggataacaccagcaatatcattggacctgatgaatgatgctgagctggccagagctgtatcatacatgccaacatctgcaggacagataaaactaatgttagagaaccgtgcaatggtgaggagaaaaggatttggaatcttgataggggtctacggaagctctgtgatttacatggtccagctgccgatctttggtgtcataaatacaccttgttggataatcaaggcagctccctcttgttcagaaaaagatggaaattatgcttgcctcctaagagaggatcaagggtggtattgtaaaaatgcaggatccactgtttactacccaaatgaaaaagactgcgaaacaagaggtgatcatgttttttgtgacacagcagcagggatcaatgttgctgagcaatcaagagaatgcaacatcaacatatctaccaccaactacccatgcaaagtcagcacaggaagacaccctatcagcatggttgcactatcacctctcggtgctttggtagcttgctacaaaggggttagctgctcgactggcagtaatcaggttggaataatcaaacaactacctaaaggctgctcatacataactaaccaggacgcagacactgtaacaattgacaacactgtgtatcaactaagcaaagttgagggtgaacagcatgtaataaaagggagaccagtttcaagcagttttgatccaatcaggtttcctgaggatcagttcaatgttgcgcttgatcaagtctttgaaagcattgaaaacagtcaagcactagtggaccagtcaaacaaaattctgaacagtgcagaaaaaggaaacactggtttcattattgtaataattttgattgctgttcttgggttaaccatgatttcagtgagcatcatcatcataatcaaaaaaacaaggaagcccacaggggcacctccggagctgaatggtgttaccaacggcggtttcataccgcatagttag

SEQ ID NO: 60 - RNA, 1725 nt, Human respiratory syncytial virus
  source 1..1725: mol_type = mRNA
atggagttgccaatcctcaaaacaaatgcaattaccacaatccttgctgcagtcacactctgtttcgcttccagtcaaaacatcactgaagaattttatcaatcaacatgcagtgcagttagcaaaggctatcttagtgctctaagaactggttggtatactagtgttataactatagaattaagtaatatcaaggaaaataagtgtaatggaacagatgctaaggtaaaattgataaaacaagaattagataaatataaaaatgctgtaacagaattgcagttgctcatgcaaagcacaccagcagccaacaatcgagccagaagagaactaccaaggtttatgaattatacactcaataataccaaaaataccaatgtaacattaagcaagaaaaggaaaagaagatttcttggctttttgttaggtgttggatctgcaatcgccagtggcattgctgtatctaaggtcctgcacctagaaggggaagtgaacaaaatcaaaagtgctctactatccacaaacaaggctgtagtcagcttatcaaatggagttagtgtcttaaccagcaaagtgttagacctcaaaaactatatagataaacagttgttacctattgtgaacaagcaaagctgcagcatatcaaacattgaaactgtgatagagttccaacaaaagaacaacagactactagagattaccagggaatttagtgttaatgcaggtgtaactacacctgtaagcacttatatgttaactaatagtgaattattatcattaatcaatgatatgcctataacaaatgatcagaaaaagttaatgtccaacaatgttcaaatagttagacagcaaagttactctatcatgtccataataaaggaggaagtcttagcatatgtagtacaattaccactatatggtgtaatagatacaccctgttggaaactgcacacatcccctctatgtacaaccaacacaaaggaagggtccaacatctgcttaacaagaaccgacagaggatggtattgtgacaatgcaggatcagtatctttcttcccacaagctgaaacatgtaaagttcaatcgaatcgggtattttgtgacacaatgaacagtttaacattaccaagtgaagtaaatctctgcaacattgacatattcaaccccaaatatgattgcaaaattatgacttcaaaaacagatgtaagcagctccgttatcacatctctaggagccattgtgtcatgctatggcaaaactaaatgtacagcatccaataaaaatcgtgggatcataaagacattttctaacgggtgtgattatgtatcaaataagggggtggatactgtgtctgtaggtaatacattatattatgtaaataagcaagaaggcaaaagtctctatgtaaaaggtgaaccaataataaatttctatgacccattagtgttcccctctgatgaatttgatgcatcaatatctcaagtcaatgagaagattaaccagagcctagcatttattcgtaaatccgatgaattattacataatgtaaatgctggtaaatccaccacaaatatcatgataactactataattatagtgattatagtaatattgttatcattaattgcagttggactgctcctatactgcaaggccagaagcacaccagtcacactaagtaaggatcaactgagtggtataaataatattgcatttagtaactga

SEQ ID NO: 61 - RNA, 1617 nt, Human parainfluenza virus
  source 1..1617: mol_type = mRNA
atgccaatttcaatactgttaattattacaaccatgatcatggcatcacactgccaaatagacatcacaaaactacagcatgtaggtgtattggtcaacagtcccaaagggatgaagatatcacaaaacttcgaaacaagatatctaatcctgagtctcataccaaaaatagaagattctaactcttgtggtgaccaacagatcaagcaatacaagaggttattggatagactgatcattcctttatatgatggactaagattacagaaggatgtgatagtgactaatcaagaatccaatgaaaacactgatcccagaacagaacgattctttggaggggtaattggaactattgctctaggagtagcaacctcagcacaaattacagcagcagttgctctggttgaagccaagcaggcaagatcagacattgaaaaactcaaggaagcaatcagggacacaaataaagcagtgcagtcagttcagagctctgtaggaaatttgatagtagcaattaaatcagtccaggattatgtcaacaaagaaatcgtgccatcgattgcgagactaggttgtgaagcagcaggacttcagttagggattgcattaacacagcattactcagaattaacaaatatatttggtgataacataggatcgttacaagaaaaaggaataaaattacaaggtatagcatcattataccgtacaaatatcacagaaatattcacaacatcaacagttgacaaatatgatatttatgatctattatttacagaatcaataaaggtgagagttatagatgttgatttgaatgattactcaataaccctccaagtcagactccctttattgaccagactgctgaacactcaaatctacaaagtagattccatatcatacaatatccaaaatagagaatggtatatccctcttcccagccatatcatgacgaaaggggcatttctaggtggagcagatgtcaaagaatgcatagaagcattcagcagttatatatgcccttctgatccaggatttgtactaaaccatgaaatggagagctgtctatcaggaaacatatcccaatgtccaagaaccacagtcacatcagacatagttcctaggtatgcatttgtcaatggaggagtggttgcgaattgtataacaactacatgtacatgcaatggtatcggtaatagaatcaaccaaccacctgatcaaggagtcaaaattataacacataaagaatgtaatacaataggtatcaacggaatgctattcaacacaaacaaagaaggaactcttgcattctacacaccagacgacataacattaaacaattctgttgcacttgatccgattgacatatcaatcgagctcaacaaggccaaatcagatcttgaggaatcaaaagaatggataagaaggtcaaatcaaaagctagattctattggaagttggcatcaatctagcactacaatcatagttattttgataatgatgattatattgtttataattaatataacaataattacaattgcaattaagtattacagaattcaaaagagaaatcgagtggatcaaaatgataagccgtatgtattaacaaacaag

SEQ ID NO: 62 - RNA, 1716 nt, Human parainfluenza virus 3
  source 1..1716: mol_type = mRNA
atggaatactggaagcacaccaaccacggaaaggatgctggtaatgagctggagacatccacagccactcatggcaacaagctcaccaacaagataacatatatattgtggacgataaccctggtgttattatcaatagtcttcatcatagtgctaactaattccatcaaaagtgaaaaggcccgcgaatcattgctacaagacataaataatgagtttatggaagttacagaaaagatccaagtggcatcggataatactaatgatctaatacagtcaggagtgaatacaaggcttcttacaattcagagtcatgtccagaattatataccaatatcattgacacaacaaatatcggatcttaggaaattcattagtgaaattacaattagaaatgataatcaagaagtgccaccacaaagaataacacatgatgtgggtataaaacctttaaatccagatgatttctggagatgcacgtctggtcttccatctttgatgaaaactccaaaaataagattaatgccgggaccaggattattagctatgccaacgactgttgatggctgtgtcagaaccccgtccttagtgataaatgatctgatttatgcttacacctcaaatctaattactcgaggttgccaggatatagggaaatcatatcaagtattacagatagggataataactgtaaactcagacttggtacctgacttaaatcctaggatctctcataccttcaacataaatgacaatagaaagtcatgttctctagcactcctaaatacagatgtatatcaactgtgttcaaccccaaaagttgatgaaagatcagattatgcatcatcaggcatagaagatattgtacttgatattgtcaattatgatggctcaatctcgacaacaagatttaagaataataatataagttttgatcaaccatatgcggcattatacccatctgttggaccagggatatactacaaaggcaaaataatatttctcgggtatggaggtcttgaacatccaataaatgagaatgcaatctgcaacacaactgggtgtcctgggaaaacacagagagactgtaatcaagcatctcatagtccatggttttcagatagaaggatggtcaactctataattgttgttgacaagggcttgaactcagttccaaaattgaaggtatggacgatatctatgagacaaaattactgggggtcagaaggaagattacttctactaggtaacaagatctacatatacacaagatctacaagttggcacagcaagttacaattaggaataattgacattactgactacagtgatataaggataaaatggacatggcataatgtgctatcaagaccaggaaacaatgaatgtccatggggacattcatgtccggatggatgtataacgggagtatataccgatgcatatccactcaatcccacaggaagcattgtatcatctgtcatattggactcacaaaaatcgagagtcaacccagtcataacttactcaacagcaaccgaaagggtaaacgagctggctatccgaaacaaaacactctcagctgggtacacaacaacaagctgcattacacactataacaaagggtattgttttcatatagtagaaataaatcataaaagcttaaacacatttcaacccatgttgttcaaaacagagattccaaaaagctgcagt

SEQ ID NO: 63 - RNA, 1716 nt, synthetic construct
  misc_feature 1..1716: note = Synthetic Polynucleotide
  source 1..1716: mol_type = other RNA
atggaatactggaagcacaccaaccacggcaaggacgccggcaacgagctggaaaccagcacagccacacacggcaacaagctgaccaacaagatcacctacatcctgtggaccatcaccctggtgctgctgagcatcgtgttcatcatcgtgctgaccaatagcatcaagagcgagaaggccagagagagcctgctgcaggacatcaacaacgagttcatggaagtgaccgagaagatccaggtggccagcgacaacaccaacgacctgatccagagcggcgtgaacacccggctgctgaccatccagagccacgtgcagaactacatccccatcagcctgacccagcagatcagcgacctgcggaagttcatcagcgagatcaccatccggaacgacaaccaggaagtgcccccccagagaatcacccacgacgtgggcatcaagcccctgaaccccgacgatttctggcggtgtacaagcggcctgcccagcctgatgaagacccccaagatccggctgatgcctggccctggactgctggccatgcctaccacagtggatggctgtgtgcggacccccagcctcgtgatcaacgatctgatctacgcctacaccagcaacctgatcacccggggctgccaggatatcggcaagagctaccaggtgctgcagatcggcatcatcaccgtgaactccgacctggtgcccgacctgaaccctcggatcagccacaccttcaacatcaacgacaacagaaagagctgcagcctggctctgctgaacaccgacgtgtaccagctgtgcagcacccccaaggtggacgagagaagcgactacgccagcagcggcatcgaggatatcgtgctggacatcgtgaactacgacggcagcatcagcaccacccggttcaagaacaacaacatcagcttcgaccagccctacgccgccctgtacccttctgtgggccctggcatctactacaagggcaagatcatcttcctgggctacggcggcctggaacaccccatcaacgagaacgccatctgcaacaccaccggctgccctggcaagacccagagagactgcaatcaggccagccacagcccctggttcagcgaccgcagaatggtcaactctatcatcgtggtggacaagggcctgaacagcgtgcccaagctgaaagtgtggacaatcagcatgcgccagaactactggggcagcgagggcagacttctgctgctgggaaacaagatctacatctacacccggtccaccagctggcacagcaaactgcagctgggaatcatcgacatcaccgactacagcgacatccggatcaagtggacctggcacaacgtgctgagcagacccggcaacaatgagtgcccttggggccacagctgccccgatggatgtatcaccggcgtgtacaccgacgcctaccccctgaatcctaccggctccatcgtgtccagcgtgatcctggacagccagaaaagcagagtgaaccccgtgatcacatacagcaccgccaccgagagagtgaacgaactggccatcagaaacaagaccctgagcgccggctacaccaccacaagctgcatcacacactacaacaagggctactgcttccacatcgtggaaatcaaccacaagtccctgaacaccttccagcccatgctgttcaagaccgagatccccaagagctgctcc

SEQ ID NO: 64 - RNA, 1617 nt, synthetic construct
  misc_feature 1..1617: note = Synthetic Polynucleotide
  source 1..1617: mol_type = other RNA
atgcccatcagcatcctgctgatcatcaccacaatgatcatggccagccactgccagatcgacatcaccaagctgcagcacgtgggcgtgctcgtgaacagccccaagggcatgaagatcagccagaacttcgagacacgctacctgatcctgagcctgatccccaagatcgaggacagcaacagctgcggcgaccagcagatcaagcagtacaagcggctgctggacagactgatcatccccctgtacgacggcctgcggctgcagaaagacgtgatcgtgaccaaccaggaaagcaacgagaacaccgacccccggaccgagagattcttcggcggcgtgatcggcacaatcgccctgggagtggccacaagcgcccagattacagccgctgtggccctggtggaagccaagcaggccagaagcgacatcgagaagctgaaagaggccatccgggacaccaacaaggccgtgcagagcgtgcagtccagcgtgggcaatctgatcgtggccatcaagtccgtgcaggactacgtgaacaaagaaatcgtgccctctatcgcccggctgggctgtgaagctgccggactgcagctgggcattgccctgacacagcactacagcgagctgaccaacatcttcggcgacaacatcggcagcctgcaggaaaagggcattaagctgcagggaatcgccagcctgtaccgcaccaacatcaccgagatcttcaccaccagcaccgtggataagtacgacatctacgacctgctgttcaccgagagcatcaaagtgcgcgtgatcgacgtggacctgaacgactacagcatcaccctgcaagtgcggctgcccctgctgaccagactgctgaacacccagatctacaaggtggacagcatctcctacaacatccagaaccgcgagtggtacatccctctgcccagccacattatgaccaagggcgcctttctgggcggagccgacgtgaaagagtgcatcgaggccttcagcagctacatctgccccagcgaccctggcttcgtgctgaaccacgagatggaaagctgcctgagcggcaacatcagccagtgccccagaaccaccgtgacctccgacatcgtgcccagatacgccttcgtgaatggcggcgtggtggccaactgcatcaccaccacctgtacctgcaacggcatcggcaaccggatcaaccagcctcccgatcagggcgtgaagattatcacccacaaagagtgtaacaccatcggcatcaacggcatgctgttcaataccaacaaagagggcaccctggccttctacacccccgacgatatcaccctgaacaactccgtggctctggaccccatcgacatctccatcgagctgaacaaggccaagagcgacctggaagagtccaaagagtggatccggcggagcaaccagaagctggactctatcggcagctggcaccagagcagcaccaccatcatcgtgatcctgattatgatgattatcctgttcatcatcaacattaccatcatcactatcgccattaagtactaccggatccagaaacggaaccgggtggaccagaatgacaagccctacgtgctgacaaacaag

SEQ ID NO: 65 - RNA, 4062 nt, Middle East respiratory syndrome coronavirus
  source 1..4062: mol_type = mRNA
atgatacactcagtgtttctactgatgttcttgttaacacctacagaaagttacgttgatgtagggccagattctgttaagtctgcttgtattgaggttgatatacaacagaccttctttgataaaacttggcctaggccaattgatgtttctaaggctgacggtattatataccctcaaggccgtacatattctaacataactatcacttatcaaggtctttttccctatcagggagaccatggtgatatgtatgtttactctgcaggacatgctacaggcacaactccacaaaagttgtttgtagctaactattctcaggacgtcaaacagtttgctaatgggtttgtcgtccgtataggagcagctgccaattccactggcactgttattattagcccatctaccagcgctactatacgaaaaatttaccctgcttttatgctgggttcttcagttggtaatttctcagatggtaaaatgggccgcttcttcaatcatactctagttcttttgcccgatggatgtggcactttacttagagctttttattgtattctagagcctcgctctggaaatcattgtcctgctggcaattcctatacttcttttgccacttatcacactcctgcaacagattgttctgatggcaattacaatcgtaatgccagtctgaactcttttaaggagtattttaatttacgtaactgcacctttatgtacacttataacattaccgaagatgagattttagagtggtttggcattacacaaactgctcaaggtgttcacctcttctcatctcggtatgttgatttgtacggcggcaatatgtttcaatttgccaccttgcctgtttatgatactattaagtattattctatcattcctcacagtattcgttctatccaaagtgatagaaaagcttgggctgccttctacgtatataaacttcaaccgttaactttcctgttggatttttctgttgatggttatatacgcagagctatagactgtggttttaatgatttgtcacaactccactgctcatatgaatccttcgatgttgaatctggagtttattcagtttcgtctttcgaagcaaaaccttctggctcagttgtggaacaggctgaaggtgttgaatgtgatttttcacctcttctgtctggcacacctcctcaggtttataatttcaagcgtttggtttttaccaattgcaattataatcttaccaaattgctttcacttttttctgtgaatgattttacttgtagtcaaatatctccagcagcaattgctagcaactgttattcttcactgattttggattatttttcatacccacttagtatgaaatccgatctcagtgttagttctgctggtccaatatcccagtttaattataaacagtccttttctaatcccacatgtttgatcttagcgactgttcctcataaccttactactattactaagcctcttaagtacagctatattaacaagtgctctcgtcttctttctgatgatcgtactgaagtacctcagttagtgaacgctaatcaatactcaccctgtgtatccattgtcccatccactgtgtgggaagacggtgattattataggaaacaactatctccacttgaaggtggtggctggcttgttgctagtggctcaactgttgccatgactgagcaattacagatgggctttggtattacagttcaatatggtacagacaccaatagtgtttgccccaagcttgaatttgctaatgacacaaaaattgcctctcaattaggcaattgcgtggaatattccctctatggtgtttcgggccgtggtgtttttcagaattgcacagctgtaggtgttcgacagcagcgctttgtttatgatgcgtaccagaatttagttggctattattctgatgatggcaactactactgtctgcgtgcttgtgttagtgttcctgtttctgtcatctatgataaagaaactaaaacccacgctactctatttggtagtgttgcatgtgaacacatttcttctaccatgtctcaatactcccgttctacgcgatcaatgcttaaacggcgagattctacatatggcccccttcagacacctgttggttgtgtcctaggacttgttaattcctctttgttcgtagaggactgcaagttgcctctcggtcaatctctctgtgctcttcctgacacacctagtactctcacacctcgcagtgtgcgctctgtgccaggtgaaatgcgcttggcatccattgcttttaatcatcccattcaggttgatcaacttaatagtagttattttaaattaagtatacccactaatttttcctttggtgtgactcaggagtacattcagacaaccattcagaaagttactgttgattgtaaacagtacgtttgcaatggtttccagaagtgtgagcaattactgcgcgagtatggccagttttgttccaaaataaaccaggctctccatggtgccaatttacgccaggatgattctgtacgtaatttgtttgcgagcgtgaaaagctctcaatcatctcctatcataccaggttttggaggtgactttaatttgacacttctagaacctgtttctatatctactggcagtcgtagtgcacgtagtgctattgaggatttgctatttgacaaagtcactatagctgatcctggttatatgcaaggttacgatgattgtatgcagcaaggtccagcatcagctcgtgatcttatttgtgctcaatatgtggctggttataaagtattacctcctcttatggatgttaatatggaagccgcgtatacttcatctttgcttggcagcatagcaggtgttggctggactgctggcttatcctcctttgctgctattccatttgcacagagtatyttttataggttaaacggtgttggcattactcaacaggttctttcagagaaccaaaagcttattgccaataagtttaatcaggctctgggagctatgcaaacaggcttcactacaactaatgaagcttttcggaaggttcaggatgctgtgaacaacaatgcacaggctctatccaaattagctagcgagctatctaatacttttggtgctatttccgcctctattggagacatcatacaacgtcttgatgttctcgaacaggacgcccaaatagacagacttattaatggccgtttgacaacactaaatgcttttgttgcacagcagcttgttcgttccgaatcagctgctctttccgctcaattggctaaagataaagtcaatgagtgtgtcaaggcacaatccaagcgttctggattttgcggtcaaggcacacatatagtgtcctttgttgtaaatgcccctaatggcctttactttatgcatgttggttattaccctagcaaccacattgaggttgtttctgcttatggtctttgcgatgcagctaaccctactaattgtatagcccctgttaatggctactttattaaaactaataacactaggattgttgatgagtggtcatatactggctcgtccttctatgcacctgagcccatcacctctcttaatactaagtatgttgcaccacaggtgacataccaaaacatttctactaacctccctcctcctcttctcggcaattccaccgggattgacttccaagatgagttggatgagtttttcaaaaatgttagcaccagtatacctaattttggttctctaacacagattaatactacattactcgatcttacctacgagatgttgtctcttcaacaagttgttaaagcccttaatgagtcttacatagaccttaaagagcttggcaattatacttattacaacaaatggccgtggtacatttggcttggtttcattgctgggcttgttgccttagctctatgcgtcttcttcatactgtgctgcactggttgtggcacaaactgtatgggaaaacttaagtgtaatcgttgttgtgatagatacgaggaatacgacctcgagccgcataaggttcatgttcactaa

SEQ ID NO: 66 - RNA, 4062 nt, synthetic construct
  misc_feature 1..4062: note = Synthetic Polynucleotide
  source 1..4062: mol_type = other RNA
atgatacactcagtgtttctactgatgttcttgttaacacctacagaaagttacgttgatgtagggccagattctgttaagtctgcttgtattgaggttgatatacaacagactttctttgataaaacttggcctaggccaattgatgtttctaaggctgacggtattatataccctcaaggccgtacatattctaacataactatcacttatcaaggtctttttccctatcagggagaccatggtgatatgtatgtttactctgcaggacatgctacaggcacaactccacaaaagttgtttgtagctaactattctcaggacgtcaaacagtttgctaatgggtttgtcgtccgtataggagcagctgccaattccactggcactgttattattagcccatctaccagcgctactatacgaaaaatttaccctgcttttatgctgggttcttcagttggtaatttctcagatggtaaaatgggccgcttcttcaatcatactctagttcttttgcccgatggatgtggcactttacttagagctttttattgtattctggagcctcgctctggaaatcattgtcctgctggcaattcctatacttcttttgccacttatcacactcctgcaacagattgttctgatggcaattacaatcgtaatgccagtctgaactcttttaaggagtattttaatttacgtaactgcacctttatgtacacttataacattaccgaagatgagattttagagtggtttggcattacacaaactgctcaaggtgttcacctcttctcatctcggtatgttgatttgtacggcggcaatatgtttcaatttgccaccttgcctgtttatgatactattaagtattattctatcattcctcacagtattcgttctatccaaagtgatagaaaagcttgggctgccttctacgtatataaacttcaaccgttaactttcctgttggatttttctgttgatggttatatacgcagagctatagactgtggttttaatgatttgtcacaactccactgctcatatgaatccttcgatgttgaatctggagtttattcagtttcgtctttcgaagcaaaaccttctggctcagttgtggaacaggctgaaggtgttgaatgtgatttttcacctcttctgtctggcacacctcctcaggtttataatttcaagcgtttggtttttaccaattgcaattataatcttaccaaattgctttcacttttttctgtgaatgattttacttgtagtcaaatatctccagcagcaattgctagcaactgttattcttcactgattttggattacttttcatacccacttagtatgaaatccgatctcagtgttagttctgctggtccaatatcccagtttaattataaacagtccttttctaatcccacatgtttgattttagcgactgttcctcataaccttactactattactaagcctcttaagtacagctatattaacaagtgctctcgtcttctttctgatgatcgtactgaagtacctcagttagtgaacgctaatcaatactcaccctgtgtatccattgtcccatccactgtgtgggaagacggtgattattataggaaacaactatctccacttgaaggtggtggctggcttgttgctagtggctcaactgttgccatgactgagcaattacagatgggctttggtattacagttcaatatggtacagacaccaatagtgtttgccccaagcttgaatttgctaatgacacaaaaattgcctctcaattaggcaattgcgtggaatattccctctatggtgtttcgggccgtggtgtttttcagaattgcacagctgtaggtgttcgacagcagcgctttgtttatgatgcgtaccagaatttagttggctattattctgatgatggcaactactactgtttgcgtgcttgtgttagtgttcctgtttctgtcatctatgataaagaaactaaaacccacgctactctatttggtagtgttgcatgtgaacacatttcttctaccatgtctcaatactcccgttctacgcgatcaatgcttaaacggcgagattctacatatggcccccttcagacacctgttggttgtgtcctaggacttgttaattcctctttgttcgtagaggactgcaagttgcctcttggtcaatctctctgtgctcttcctgacacacctagtactctcacacctcgcagtgtgcgctctgttccaggtgaaatgcgcttggcatccattgcttttaatcatcctattcaggttgatcaacttaatagtagttattttaaattaagtatacccactaatttttcctttggtgtgactcaggagtacattcagacaaccattcagaaagttactgttgattgtaaacagtacgtttgcaatggtttccagaagtgtgagcaattactgcgcgagtatggccagttttgttccaaaataaaccaggctctccatggtgccaatttacgccaggatgattctgtacgtaatttgtttgcgagcgtgaaaagctctcaatcatctcctatcataccaggttttggaggtgactttaatttgacacttctggaacctgtttctatatctactggcagtcgtagtgcacgtagtgctattgaggatttgctatttgacaaagtcactatagctgatcctggttatatgcaaggttacgatgattgcatgcagcaaggtccagcatcagctcgtgatcttatttgtgctcaatatgtggctggttacaaagtattacctcctcttatggatgttaatatggaagccgcgtatacttcatctttgcttggcagcatagcaggtgttggctggactgctggcttatcctcctttgctgctattccatttgcacagagtatcttttataggttaaacggtgttggcattactcaacaggttctttcagagaaccaaaagcttattgccaataagtttaatcaggctctgggagctatgcaaacaggcttcactacaactaatgaagcttttcagaaggttcaggatgctgtgaacaacaatgcacaggctctatccaaattagctagcgagctatctaatacttttggtgctatttccgcctctattggagacatcatacaacgtcttgatgttctcgaacaggacgcccaaatagacagacttattaatggccgtttgacaacactaaatgcttttgttgcacagcagcttgttcgttccgaatcagctgctctttccgctcaattggctaaagataaagtcaatgagtgtgtcaaggcacaatccaagcgttctggattttgcggtcaaggcacacatatagtgtcctttgttgtaaatgcccctaatggcctttacttcatgcatgttggttattaccctagcaaccacattgaggttgtttctgcttatggtctttgcgatgcagctaaccctactaattgtatagcccctgttaatggctactttattaaaactaataacactaggattgttgatgagtggtcatatactggctcgtccttctatgcacctgagcccattacctcccttaatactaagtatgttgcaccacaggtgacataccaaaacatttctactaacctccctcctcctcttctcggcaattccaccgggattgacttccaagatgagttggatgagtttttcaaaaatgttagcaccagtatacctaattttggttccctaacacagattaatactacattactcgatcttacctacgagatgttgtctcttcaacaagttgttaaagcccttaatgagtcttacatagaccttaaagagcttggcaattatacttattacaacaaatggccgtggtacatttggcttggtttcattgctgggcttgttgccttagctctatgcgtcttcttcatactgtgctgcactggttgtggcacaaactgtatgggaaaacttaagtgtaatcgttgttgtgatagatacgaggaatacgacctcgagccgcataaggttcatgttcactaa

SEQ ID NO: 67 - RNA, 1845 nt, synthetic construct
  misc_feature 1..1845: note = Synthetic Polynucleotide
  source 1..1845: mol_type = other RNA
atgatccactccgtgttcctcctcatgttcctgttgacccccactgagtcagactgcaagctcccgctgggacagtccctgtgtgcgctgcctgacactcctagcactctgaccccacgctccgtgcggtcggtgcctggcgaaatgcggctggcctccatcgccttcaatcacccaatccaagtggatcagctgaatagctcgtatttcaagctgtccatccccacgaacttctcgttcggggtcacccaggagtacatccagaccacaattcagaaggtcaccgtcgattgcaagcaatacgtgtgcaacggcttccagaagtgcgagcagctgctgagagaatacgggcagttttgcagcaagatcaaccaggcgctgcatggagctaacttgcgccaggacgactccgtgcgcaacctctttgcctctgtgaagtcatcccagtcctccccaatcatcccgggattcggaggggacttcaacctgaccctcctggagcccgtgtcgatcagcaccggtagcagatcggcgcgctcagccattgaagatcttctgttcgacaaggtcaccatcgccgatccgggctacatgcagggatacgacgactgtatgcagcagggaccagcctccgcgagggacctcatctgcgcgcaatacgtggccgggtacaaagtgctgcctcctctgatggatgtgaacatggaggccgcttatacttcgtccctgctcggctctatcgccggcgtggggtggaccgccggcctgtcctccttcgccgctatcccctttgcacaatccattttctaccggctcaacggcgtgggcattactcaacaagtcctgtcggagaaccagaagttgatcgcaaacaagttcaatcaggccctgggggccatgcagactggattcactacgactaacgaagcgttccagaaggtccaggacgctgtgaacaacaacgcccaggcgctctcaaagctggcctccgaactcagcaacaccttcggagccatcagcgcatcgatcggtgacataattcagcggctggacgtgctggagcaggacgcccagatcgaccgcctcatcaacggacggctgaccaccttgaatgccttcgtggcacaacagctggtccggagcgaatcagcggcactttccgcccaactcgccaaggacaaagtcaacgaatgcgtgaaggcccagtccaagaggtccggtttctgcggtcaaggaacccatattgtgtccttcgtcgtgaacgcgcccaacggtctgtactttatgcacgtcggctactacccgagcaatcatatcgaagtggtgtccgcctacggcctgtgcgatgccgctaaccccactaactgtattgcccctgtgaacggatattttattaagaccaacaacacccgcattgtggacgaatggtcatacaccggttcgtccttctacgcgcccgagcccatcacttcactgaacaccaaatacgtggctccgcaagtgacctaccagaacatctccaccaatttgccgccgccgctgctcggaaacagcaccggaattgatttccaagatgaactggacgaattcttcaagaacgtgtccacttccattcccaacttcggaagcctgacacagatcaacaccacccttctcgacctgacctacgagatgctgagccttcaacaagtggtcaaggccctgaacgagagctacatcgacctgaaggagctgggcaactatacctactacaacaagtggccggacaagattgaggagattctgtcgaaaatctaccacattgaaaacgagatcgccagaatcaagaagcttatcggcgaagcc

SEQ ID NO: 68 - RNA, 4071 nt, synthetic construct
  misc_feature 1..4071: note = Synthetic Polynucleotide
  source 1..4071: mol_type = other RNA
atggaaacccctgcccagctgctgttcctgctgctgctgtggctgcctgataccaccggcagctatgtggacgtgggccccgatagcgtgaagtccgcctgtatcgaagtggacatccagcagacctttttcgacaagacctggcccagacccatcgacgtgtccaaggccgacggcatcatctatccacaaggccggacctacagcaacatcaccattacctaccagggcctgttcccatatcaaggcgaccacggcgatatgtacgtgtactctgccggccacgccaccggcaccacaccccagaaactgttcgtggccaactacagccaggacgtgaagcagttcgccaacggcttcgtcgtgcggattggcgccgctgccaatagcaccggcacagtgatcatcagccccagcaccagcgccaccatccggaagatctaccccgccttcatgctgggcagctccgtgggcaatttcagcgacggcaagatgggccggttcttcaaccacaccctggtgctgctgcccgatggctgtggcacactgctgagagccttctactgcatcctggaacccagaagcggcaaccactgccctgccggcaatagctacaccagcttcgccacctaccacacacccgccaccgattgctccgacggcaactacaaccggaacgccagcctgaacagcttcaaagagtacttcaacctgcggaactgcaccttcatgtacacctacaatatcaccgaggacgagatcctggaatggttcggcatcacccagaccgcccagggcgtgcacctgttcagcagcagatacgtggacctgtacggcggcaacatgttccagtttgccaccctgcccgtgtacgacaccatcaagtactacagcatcatcccccacagcatccggtccatccagagcgacagaaaagcctgggccgccttctacgtgtacaagctgcagcccctgaccttcctgctggacttcagcgtggacggctacatcagacgggccatcgactgcggcttcaacgacctgagccagctgcactgctcctacgagagcttcgacgtggaaagcggcgtgtacagcgtgtccagcttcgaggccaagcctagcggcagcgtggtggaacaggctgagggcgtggaatgcgacttcagccctctgctgagcggcacccctccccaggtgtacaacttcaagcggctggtgttcaccaactgcaattacaacctgaccaagctgctgagcctgttctccgtgaacgacttcacctgtagccagatcagccctgccgccattgccagcaactgctacagcagcctgatcctggactacttcagctaccccctgagcatgaagtccgatctgagcgtgtcctccgccggacccatcagccagttcaactacaagcagagcttcagcaaccctacctgcctgattctggccaccgtgccccacaatctgaccaccatcaccaagcccctgaagtacagctacatcaacaagtgcagcagactgctgtccgacgaccggaccgaagtgccccagctcgtgaacgccaaccagtacagcccctgcgtgtccatcgtgcccagcaccgtgtgggaggacggcgactactacagaaagcagctgagccccctggaaggcggcggatggctggtggcttctggaagcacagtggccatgaccgagcagctgcagatgggctttggcatcaccgtgcagtacggcaccgacaccaacagcgtgtgccccaagctggaattcgccaatgacaccaagatcgccagccagctgggaaactgcgtggaatactccctgtatggcgtgtccggacggggcgtgttccagaattgcacagcagtgggagtgcggcagcagagattcgtgtacgatgcctaccagaacctcgtgggctactacagcgacgacggcaattactactgcctgcgggcctgtgtgtccgtgcccgtgtccgtgatctacgacaaagagacaaagacccacgccacactgttcggctccgtggcctgcgagcacatcagctccaccatgagccagtactcccgctccacccggtccatgctgaagcggagagatagcacctacggccccctgcagacacctgtgggatgtgtgctgggcctcgtgaacagctccctgtttgtggaagattgcaagctgcccctgggccagagcctgtgtgccctgccagatacccctagcaccctgacccctagaagcgtgcgctctgtgcccggcgaaatgcggctggcctctatcgccttcaatcaccccatccaggtggaccagctgaactccagctacttcaagctgagcatccccaccaacttcagcttcggcgtgacccaggagtacatccagaccacaatccagaaagtgaccgtggactgcaagcagtacgtgtgcaacggctttcagaagtgcgaacagctgctgcgcgagtacggccagttctgcagcaagatcaaccaggccctgcacggcgccaacctgagacaggatgacagcgtgcggaacctgttcgccagcgtgaaaagcagccagtccagccccatcatccctggcttcggcggcgactttaacctgaccctgctggaacctgtgtccatcagcaccggctccagaagcgccagatccgccatcgaggacctgctgttcgacaaagtgaccattgccgaccccggctacatgcagggctacgacgattgcatgcagcagggcccagccagcgccagggatctgatctgtgcccagtatgtggccggctacaaggtgctgccccccctgatggacgtgaacatggaagccgcctacacctccagcctgctgggctctattgctggcgtgggatggacagccggcctgtctagctttgccgccatccctttcgcccagagcatcttctaccggctgaacggcgtgggcatcacacaacaggtgctgagcgagaaccagaagctgatcgccaacaagtttaaccaggcactgggcgccatgcagaccggcttcaccaccaccaacgaggccttcagaaaggtgcaggacgccgtgaacaacaacgcccaggctctgagcaagctggcctccgagctgagcaataccttcggcgccatcagcgcctccatcggcgacatcatccagcggctggacgtgctggaacaggacgcccagatcgaccggctgatcaacggcagactgaccaccctgaacgccttcgtggcacagcagctcgtgcggagcgaatctgccgctctgtctgctcagctggccaaggacaaagtgaacgagtgcgtgaaggcccagtccaagcggagcggcttttgtggccagggcacccacatcgtgtccttcgtcgtgaatgcccccaacggcctgtactttatgcacgtgggctattaccccagcaaccacatcgaggtggtgtccgcctatggcctgtgcgacgccgccaatcctaccaactgtatcgcccccgtgaacggctacttcatcaagaccaacaacacccggatcgtggacgagtggtcctacacaggcagcagcttctacgcccccgagcccatcacctccctgaacaccaaatacgtggccccccaagtgacataccagaacatctccaccaacctgccccctccactgctgggaaattccaccggcatcgacttccaggacgagctggacgagttcttcaagaacgtgtccacctccatccccaacttcggcagcctgacccagatcaacaccactctgctggacctgacctacgagatgctgtccctgcaacaggtcgtgaaagccctgaacgagagctacatcgacctgaaagagctggggaactacacctactacaacaagtggccttggtacatttggctgggctttatcgccggcctggtggccctggccctgtgcgtgttcttcatcctgtgctgcaccggctgcggcaccaattgcatgggcaagctgaaatgcaaccggtgctgcgacagatacgaggaatacgacctggaacctcacaaagtgcatgtgcac

SEQ ID NO: 69 - RNA, 1864 nt, synthetic construct
  misc_feature 1..1864: note = Synthetic Polynucleotide
  source 1..1864: mol_type = other RNA
tcaagcttttggaccctcgtacagaagctaatacgactcactatagggaaataagagagaaaagaagagtaagaagaaatataagagccaccatgggtctcaaggtgaacgtctctgccgtattcatggcagtactgttaactctccaaacacccgccggtcaaattcattggggcaatctctctaagataggggtagtaggaataggaagtgcaagctacaaagttatgactcgttccagccatcaatcattagtcataaaattaatgcccaatataactctcctcaataactgcacgagggtagagattgcagaatacaggagactactaagaacagttttggaaccaattagggatgcacttaatgcaatgacccagaacataaggccggttcagagcgtagcttcaagtaggagacacaagagatttgcgggagtagtcctggcaggtgcggccctaggtgttgccacagctgctcagataacagccggcattgcacttcaccggtccatgctgaactctcaggccatcgacaatctgagagcgagcctggaaactactaatcaggcaattgaggcaatcagacaagcagggcaggagatgatattggctgttcagggtgtccaagactacatcaataatgagctgataccgtctatgaaccagctatcttgtgatctaatcggtcagaagctcgggctcaaattgcttagatactatacagaaatcctgtcattatttggccccagcctacgggaccccatatctgcggagatatctatccaggctttgagttatgcacttggaggagatatcaataaggtgttagaaaagctcggatacagtggaggcgatttactaggcatcttagagagcagaggaataaaggctcggataactcacgtcgacacagagtcctacttcatagtcctcagtatagcctatccgacgctgtccgagattaagggggtgattgtccaccggctagagggggtctcgtacaacataggctctcaagagtggtataccactgtgcccaagtatgttgcaacccaagggtaccttatctcgaattttgatgagtcatcatgtactttcatgccagaggggactgtgtgcagccaaaatgccttgtacccgatgagtcctctgctccaagaatgcctccgggggtccaccaagtcctgtgctcgtacactcgtatccgggtcttttgggaaccggttcattttatcacaagggaacctaatagccaattgtgcatcaattctttgtaagtgttacacaacaggtacgattattaatcaagaccctgacaagatcctaacatacattgctgccgatcgctgcccggtagtcgaggtgaacggcgtgaccatccaagtcgggagcaggaggtatccagacgctgtgtacttgcacagaattgacctcggtcctcccatatcattggagaggttggacgtagggacaaatctggggaatgcaattgccaaattggaggatgccaaggaattgttggaatcatcggaccagatattgagaagtatgaaaggtttatcgagcactagcatagtctacatcctgattgcagtgtgtcttggagggttgatagggatccccactttaatatgttgctgcagggggcgttgtaacaaaaagggagaacaagttggtatgtcaagaccaggcctaaagcctgaccttacaggaacatcaaaatcctatgtaagatcgctttgatgataataggctggagcctcggtggccaagcttcttgccccttgggcctccccccagcccctcctccccttcctgcacccgtacccccgtggtctttgaataaagtctgagtgggcggc

SEQ ID NO: 70 - RNA, 1653 nt, synthetic construct
  misc_feature 1..1653: note = Synthetic Polynucleotide
  source 1..1653: mol_type = other RNA
atgggtctcaaggtgaacgtctctgccgtattcatggcagtactgttaactctccaaacacccgccggtcaaattcattggggcaatctctctaagataggggtagtaggaataggaagtgcaagctacaaagttatgactcgttccagccatcaatcattagtcataaaattaatgcccaatataactctcctcaataactgcacgagggtagagattgcagaatacaggagactactaagaacagttttggaaccaattagggatgcacttaatgcaatgacccagaacataaggccggttcagagcgtagcttcaagtaggagacacaagagatttgcgggagtagtcctggcaggtgcggccctaggtgttgccacagctgctcagataacagccggcattgcacttcaccggtccatgctgaactctcaggccatcgacaatctgagagcgagcctggaaactactaatcaggcaattgaggcaatcagacaagcagggcaggagatgatattggctgttcagggtgtccaagactacatcaataatgagctgataccgtctatgaaccagctatcttgtgatctaatcggtcagaagctcgggctcaaattgcttagatactatacagaaatcctgtcattatttggccccagcctacgggaccccatatctgcggagatatctatccaggctttgagttatgcacttggaggagatatcaataaggtgttagaaaagctcggatacagtggaggcgatttactaggcatcttagagagcagaggaataaaggctcggataactcacgtcgacacagagtcctacttcatagtcctcagtatagcctatccgacgctgtccgagattaagggggtgattgtccaccggctagagggggtctcgtacaacataggctctcaagagtggtataccactgtgcccaagtatgttgcaacccaagggtaccttatctcgaattttgatgagtcatcatgtactttcatgccagaggggactgtgtgcagccaaaatgccttgtacccgatgagtcctctgctccaagaatgcctccgggggtccaccaagtcctgtgctcgtacactcgtatccgggtcttttgggaaccggttcattttatcacaagggaacctaatagccaattgtgcatcaattctttgtaagtgttacacaacaggtacgattattaatcaagaccctgacaagatcctaacatacattgctgccgatcgctgcccggtagtcgaggtgaacggcgtgaccatccaagtcgggagcaggaggtatccagacgctgtgtacttgcacagaattgacctcggtcctcccatatcattggagaggttggacgtagggacaaatctggggaatgcaattgccaaattggaggatgccaaggaattgttggaatcatcggaccagatattgagaagtatgaaaggtttatcgagcactagcatagtctacatcctgattgcagtgtgtcttggagggttgatagggatccccactttaatatgttgctgcagggggcgttgtaacaaaaagggagaacaagttggtatgtcaagaccaggcctaaagcctgaccttacaggaacatcaaaatcctatgtaagatcgctttga

SEQ ID NO: 71 - RNA, 1925 nt, synthetic construct
  misc_feature 1..1925: note = Synthetic Polynucleotide
  source 1..1925: mol_type = other RNA
ggggaaataagagagaaaagaagagtaagaagaaatataagagccaccatgggtctcaaggtgaacgtctctgccgtattcatggcagtactgttaactctccaaacacccgccggtcaaattcattggggcaatctctctaagataggggtagtaggaataggaagtgcaagctacaaagttatgactcgttccagccatcaatcattagtcataaaattaatgcccaatataactctcctcaataactgcacgagggtagagattgcagaatacaggagactactaagaacagttttggaaccaattagggatgcacttaatgcaatgacccagaacataaggccggttcagagcgtagcttcaagtaggagacacaagagatttgcgggagtagtcctggcaggtgcggccctaggtgttgccacagctgctcagataacagccggcattgcacttcaccggtccatgctgaactctcaggccatcgacaatctgagagcgagcctggaaactactaatcaggcaattgaggcaatcagacaagcagggcaggagatgatattggctgttcagggtgtccaagactacatcaataatgagctgataccgtctatgaaccagctatcttgtgatctaatcggtcagaagctcgggctcaaattgcttagatactatacagaaatcctgtcattatttggccccagcctacgggaccccatatctgcggagatatctatccaggctttgagttatgcacttggaggagatatcaataaggtgttagaaaagctcggatacagtggaggcgatttactaggcatcttagagagcagaggaataaaggctcggataactcacgtcgacacagagtcctacttcatagtcctcagtatagcctatccgacgctgtccgagattaagggggtgattgtccaccggctagagggggtctcgtacaacataggctctcaagagtggtataccactgtgcccaagtatgttgcaacccaagggtaccttatctcgaattttgatgagtcatcatgtactttcatgccagaggggactgtgtgcagccaaaatgccttgtacccgatgagtcctctgctccaagaatgcctccgggggtccaccaagtcctgtgctcgtacactcgtatccgggtcttttgggaaccggttcattttatcacaagggaacctaatagccaattgtgcatcaattctttgtaagtgttacacaacaggtacgattattaatcaagaccctgacaagatcctaacatacattgctgccgatcgctgcccggtagtcgaggtgaacggcgtgaccatccaagtcgggagcaggaggtatccagacgctgtgtacttgcacagaattgacctcggtcctcccatatcattggagaggttggacgtagggacaaatctggggaatgcaattgccaaattggaggatgccaaggaattgttggaatcatcggaccagatattgagaagtatgaaaggtttatcgagcactagcatagtctacatcctgattgcagtgtgtcttggagggttgatagggatccccactttaatatgttgctgcagggggcgttgtaacaaaaagggagaacaagttggtatgtcaagaccaggcctaaagcctgaccttacaggaacatcaaaatcctatgtaagatcgctttgatgataataggctggagcctcggtggccaagcttcttgccccttgggcctccccccagcccctcctccccttcctgcacccgtacccccgtggtctttgaataaagtctgagtgggcggcaaaaaaaaaaaaaaaaaaaaaaaaaaaaaaaaaaaaaaaaaaaaaaaaaaaaaaaaaaaaaaaaaaaaaaaaaaaaaaaaaaaaaaaaaaaaaaaaaaaatctag

SEQ ID NO: 72 - RNA, 1864 nt, synthetic construct
  misc_feature 1..1864: note = Synthetic Polynucleotide
  source 1..1864: mol_type = other RNA
tcaagcttttggaccctcgtacagaagctaatacgactcactatagggaaataagagagaaaagaagagtaagaagaaatataagagccaccatgggtctcaaggtgaacgtctctgtcatattcatggcagtactgttaactcttcaaacacccaccggtcaaatccattggggcaatctctctaagataggggtggtaggggtaggaagtgcaagctacaaagttatgactcgttccagccatcaatcattagtcataaagttaatgcccaatataactctcctcaacaattgcacgagggtagggattgcagaatacaggagactactgagaacagttctggaaccaattagagatgcacttaatgcaatgacccagaatataagaccggttcagagtgtagcttcaagtaggagacacaagagatttgcgggagttgtcctggcaggtgcggccctaggcgttgccacagctgctcaaataacagccggtattgcacttcaccagtccatgctgaactctcaagccatcgacaatctgagagcgagcctagaaactactaatcaggcaattgaggcaatcagacaagcagggcaggagatgatattggctgttcagggtgtccaagactacatcaataatgagctgataccgtctatgaatcaactatcttgtgatttaatcggccagaagctagggctcaaattgctcagatactatacagaaatcctgtcattatttggccccagcttacgggaccccatatctgcggagatatctatccaggctttgagctatgcgcttggaggagatatcaataaggtgttggaaaagctcggatacagtggaggtgatctactgggcatcttagagagcagaggaataaaggcccggataactcacgtcgacacagagtcctacttcattgtactcagtatagcctatccgacgctatccgagattaagggggtgattgtccaccggctagagggggtctcgtacaacataggctctcaagagtggtataccactgtgcccaagtatgttgcaacccaagggtaccttatctcgaattttgatgagtcatcatgcactttcatgccagaggggactgtgtgcagccagaatgccttgtacccgatgagtcctctgctccaagaatgcctccgggggtccactaagtcctgtgctcgtacactcgtatccgggtctttcgggaaccggttcattttatcacaggggaacctaatagccaattgtgcatcaatcctttgcaagtgttacacaacaggaacaatcattaatcaagaccctgacaagatcctaacatacattgctgccgatcactgcccggtggtcgaggtgaatggcgtgaccatccaagtcgggagcaggaggtatccggacgctgtgtacttgcacaggattgacctcggtcctcccatatctttggagaggttggacgtagggacaaatctggggaatgcaattgctaagttggaggatgccaaggaattgttggagtcatcggaccagatattgaggagtatgaaaggtttatcgagcactagtatagtttacatcctgattgcagtgtgtcttggaggattgatagggatccccgctttaatatgttgctgcagggggcgttgtaacaagaagggagaacaagttggtatgtcaagaccaggcctaaagcctgatcttacaggaacatcaaaatcctatgtaaggtcactctgatgataataggctggagcctcggtggccaagcttcttgccccttgggcctccccccagcccctcctccccttcctgcacccgtacccccgtggtctttgaataaagtctgagtgggcggc

SEQ ID NO: 73 - RNA, 1653 nt, synthetic construct
  misc_feature 1..1653: note = Synthetic Polynucleotide
  source 1..1653: mol_type = other RNA
atgggtctcaaggtgaacgtctctgtcatattcatggcagtactgttaactcttcaaacacccaccggtcaaatccattggggcaatctctctaagataggggtggtaggggtaggaagtgcaagctacaaagttatgactcgttccagccatcaatcattagtcataaagttaatgcccaatataactctcctcaacaattgcacgagggtagggattgcagaatacaggagactactgagaacagttctggaaccaattagagatgcacttaatgcaatgacccagaatataagaccggttcagagtgtagcttcaagtaggagacacaagagatttgcgggagttgtcctggcaggtgcggccctaggcgttgccacagctgctcaaataacagccggtattgcacttcaccagtccatgctgaactctcaagccatcgacaatctgagagcgagcctagaaactactaatcaggcaattgaggcaatcagacaagcagggcaggagatgatattggctgttcagggtgtccaagactacatcaataatgagctgataccgtctatgaatcaactatcttgtgatttaatcggccagaagctagggctcaaattgctcagatactatacagaaatcctgtcattatttggccccagcttacgggaccccatatctgcggagatatctatccaggctttgagctatgcgcttggaggagatatcaataaggtgttggaaaagctcggatacagtggaggtgatctactgggcatcttagagagcagaggaataaaggcccggataactcacgtcgacacagagtcctacttcattgtactcagtatagcctatccgacgctatccgagattaagggggtgattgtccaccggctagagggggtctcgtacaacataggctctcaagagtggtataccactgtgcccaagtatgttgcaacccaagggtaccttatctcgaattttgatgagtcatcatgcactttcatgccagaggggactgtgtgcagccagaatgccttgtacccgatgagtcctctgctccaagaatgcctccgggggtccactaagtcctgtgctcgtacactcgtatccgggtctttcgggaaccggttcattttatcacaggggaacctaatagccaattgtgcatcaatcctttgcaagtgttacacaacaggaacaatcattaatcaagaccctgacaagatcctaacatacattgctgccgatcactgcccggtggtcgaggtgaatggcgtgaccatccaagtcgggagcaggaggtatccggacgctgtgtacttgcacaggattgacctcggtcctcccatatctttggagaggttggacgtagggacaaatctggggaatgcaattgctaagttggaggatgccaaggaattgttggagtcatcggaccagatattgaggagtatgaaaggtttatcgagcactagtatagtttacatcctgattgcagtgtgtcttggaggattgatagggatccccgctttaatatgttgctgcagggggcgttgtaacaagaagggagaacaagttggtatgtcaagaccaggcctaaagcctgatcttacaggaacatcaaaatcctatgtaaggtcactctga

SEQ ID NO: 74 - RNA, 1925 nt, synthetic construct
  misc_feature 1..1925: note = Synthetic Polynucleotide
  source 1..1925: mol_type = other RNA
ggggaaataagagagaaaagaagagtaagaagaaatataagagccaccatgggtctcaaggtgaacgtctctgtcatattcatggcagtactgttaactcttcaaacacccaccggtcaaatccattggggcaatctctctaagataggggtggtaggggtaggaagtgcaagctacaaagttatgactcgttccagccatcaatcattagtcataaagttaatgcccaatataactctcctcaacaattgcacgagggtagggattgcagaatacaggagactactgagaacagttctggaaccaattagagatgcacttaatgcaatgacccagaatataagaccggttcagagtgtagcttcaagtaggagacacaagagatttgcgggagttgtcctggcaggtgcggccctaggcgttgccacagctgctcaaataacagccggtattgcacttcaccagtccatgctgaactctcaagccatcgacaatctgagagcgagcctagaaactactaatcaggcaattgaggcaatcagacaagcagggcaggagatgatattggctgttcagggtgtccaagactacatcaataatgagctgataccgtctatgaatcaactatcttgtgatttaatcggccagaagctagggctcaaattgctcagatactatacagaaatcctgtcattatttggccccagcttacgggaccccatatctgcggagatatctatccaggctttgagctatgcgcttggaggagatatcaataaggtgttggaaaagctcggatacagtggaggtgatctactgggcatcttagagagcagaggaataaaggcccggataactcacgtcgacacagagtcctacttcattgtactcagtatagcctatccgacgctatccgagattaagggggtgattgtccaccggctagagggggtctcgtacaacataggctctcaagagtggtataccactgtgcccaagtatgttgcaacccaagggtaccttatctcgaattttgatgagtcatcatgcactttcatgccagaggggactgtgtgcagccagaatgccttgtacccgatgagtcctctgctccaagaatgcctccgggggtccactaagtcctgtgctcgtacactcgtatccgggtctttcgggaaccggttcattttatcacaggggaacctaatagccaattgtgcatcaatcctttgcaagtgttacacaacaggaacaatcattaatcaagaccctgacaagatcctaacatacattgctgccgatcactgcccggtggtcgaggtgaatggcgtgaccatccaagtcgggagcaggaggtatccggacgctgtgtacttgcacaggattgacctcggtcctcccatatctttggagaggttggacgtagggacaaatctggggaatgcaattgctaagttggaggatgccaaggaattgttggagtcatcggaccagatattgaggagtatgaaaggtttatcgagcactagtatagtttacatcctgattgcagtgtgtcttggaggattgatagggatccccgctttaatatgttgctgcagggggcgttgtaacaagaagggagaacaagttggtatgtcaagaccaggcctaaagcctgatcttacaggaacatcaaaatcctatgtaaggtcactctgatgataataggctggagcctcggtggccaagcttcttgccccttgggcctccccccagcccctcctccccttcctgcacccgtacccccgtggtctttgaataaagtctgagtgggcggcaaaaaaaaaaaaaaaaaaaaaaaaaaaaaaaaaaaaaaaaaaaaaaaaaaaaaaaaaaaaaaaaaaaaaaaaaaaaaaaaaaaaaaaaaaaaaaaaaaaatctag

SEQ ID NO: 75 - RNA, 2065 nt, synthetic construct
  misc_feature 1..2065: note = Synthetic Polynucleotide
  source 1..2065: mol_type = other RNA
tcaagcttttggaccctcgtacagaagctaatacgactcactatagggaaataagagagaaaagaagagtaagaagaaatataagagccaccatgtcaccgcaacgagaccggataaatgccttctacaaagataacccttatcccaagggaagtaggatagttattaacagagaacatcttatgattgacagaccctatgttctgctggctgttctgttcgtcatgtttctgagcttgatcggattgctggcaattgcaggcattagacttcatcgggcagccatctacaccgcggagatccataaaagcctcagtaccaatctggatgtgactaactccatcgagcatcaggtcaaggacgtgctgacaccactctttaaaatcatcggggatgaagtgggcctgagaacacctcagagattcactgacctagtgaaattcatctcggacaagattaaattccttaatccggatagggagtacgacttcagagatctcacttggtgcatcaacccgccagagaggatcaaactagattatgatcaatactgtgcagatgtggctgctgaagagctcatgaatgcattggtgaactcaactctactggagaccagaacaaccactcagttcctagctgtctcaaagggaaactgctcagggcccactacaatcagaggtcaattctcaaacatgtcgctgtccttgttggacttgtacttaggtcgaggttacaatgtgtcatctatagtcactatgacatcccagggaatgtatgggggaacctacctagttgaaaagcctaatctgaacagcaaagggtcagagttgtcacaactgagcatgtaccgagtgtttgaagtaggtgtgatcagaaacccgggtttgggggctccggtgttccatatgacaaactattttgagcaaccagtcagtaatggtctcggcaactgtatggtggctttgggggagctcaaactcgcagccctttgtcacggggacgattctatcataattccctatcagggatcagggaaaggtgtcagcttccagctcgtcaagctgggtgtctggaaatccccaaccgacatgcaatcctgggtccccttatcaacggatgatccagtggtagacaggctttacctctcatctcacagaggtgtcatcgctgacaatcaagcaaaatgggctgtcccgacaacacgaacagatgacaagttgcgaatggagacatgcttccagcaggcgtgtaaaggtaaaatccaagcactctgcgagaatcccgagtgggtaccattgaaggataacaggattccttcatacggggtcctgtctgttgatctgagtctgacggttgagcttaaaatcaaaattgcttcgggattcgggccattgatcacacacggctcagggatggacctatacaaatccaactgcaacaatgtgtattggctgactattccgccaatgagaaatctagccttaggcgtaatcaacacattggagtggataccgagattcaaggttagtcccaacctcttcactgtcccaattaaggaagcaggcgaagactgccatgccccaacatacctacctgcggaggtggacggtgatgtcaaactcagttccaacctggtgattctacctggtcaagatctccaatatgttttggcaacctacgatacctccagggttgagcatgctgtggtttattacgtttacagcccaagccgctcattttcttacttttatccttttaggttgcctataaagggggtcccaatcgaactacaagtggaatgcttcacatgggatcaaaaactctggtgccgtcacttctgtgtgcttgcggactcagaatccggtggacttatcactcactctgggatggtgggcatgggagtcagctgcacagctacccgggaagatggaaccaatcgcagataatgataataggctggagcctcggtggccaagcttcttgccccttgggcctccccccagcccctcctccccttcctgcacccgtacccccgtggtctttgaataaagtctgagtgggcggc

SEQ ID NO: 76 - RNA, 1854 nt, synthetic construct
  misc_feature 1..1854: note = Synthetic Polynucleotide
  source 1..1854: mol_type = other RNA
atgtcaccgcaacgagaccggataaatgccttctacaaagataacccttatcccaagggaagtaggatagttattaacagagaacatcttatgattgacagaccctatgttctgctggctgttctgttcgtcatgtttctgagcttgatcggattgctggcaattgcaggcattagacttcatcgggcagccatctacaccgcggagatccataaaagcctcagtaccaatctggatgtgactaactccatcgagcatcaggtcaaggacgtgctgacaccactctttaaaatcatcggggatgaagtgggcctgagaacacctcagagattcactgacctagtgaaattcatctcggacaagattaaattccttaatccggatagggagtacgacttcagagatctcacttggtgcatcaacccgccagagaggatcaaactagattatgatcaatactgtgcagatgtggctgctgaagagctcatgaatgcattggtgaactcaactctactggagaccagaacaaccactcagttcctagctgtctcaaagggaaactgctcagggcccactacaatcagaggtcaattctcaaacatgtcgctgtccttgttggacttgtacttaggtcgaggttacaatgtgtcatctatagtcactatgacatcccagggaatgtatgggggaacctacctagttgaaaagcctaatctgaacagcaaagggtcagagttgtcacaactgagcatgtaccgagtgtttgaagtaggtgtgatcagaaacccgggtttgggggctccggtgttccatatgacaaactattttgagcaaccagtcagtaatggtctcggcaactgtatggtggctttgggggagctcaaactcgcagccctttgtcacggggacgattctatcataattccctatcagggatcagggaaaggtgtcagcttccagctcgtcaagctgggtgtctggaaatccccaaccgacatgcaatcctgggtccccttatcaacggatgatccagtggtagacaggctttacctctcatctcacagaggtgtcatcgctgacaatcaagcaaaatgggctgtcccgacaacacgaacagatgacaagttgcgaatggagacatgcttccagcaggcgtgtaaaggtaaaatccaagcactctgcgagaatcccgagtgggtaccattgaaggataacaggattccttcatacggggtcctgtctgttgatctgagtctgacggttgagcttaaaatcaaaattgcttcgggattcgggccattgatcacacacggctcagggatggacctatacaaatccaactgcaacaatgtgtattggctgactattccgccaatgagaaatctagccttaggcgtaatcaacacattggagtggataccgagattcaaggttagtcccaacctcttcactgtcccaattaaggaagcaggcgaagactgccatgccccaacatacctacctgcggaggtggacggtgatgtcaaactcagttccaacctggtgattctacctggtcaagatctccaatatgttttggcaacctacgatacctccagggttgagcatgctgtggtttattacgtttacagcccaagccgctcattttcttacttttatccttttaggttgcctataaagggggtcccaatcgaactacaagtggaatgcttcacatgggatcaaaaactctggtgccgtcacttctgtgtgcttgcggactcagaatccggtggacttatcactcactctgggatggtgggcatgggagtcagctgcacagctacccgggaagatggaaccaatcgcagataa

SEQ ID NO: 77 - RNA, 2126 nt, synthetic construct
  misc_feature 1..2126: note = Synthetic Polynucleotide
  source 1..2126: mol_type = other RNA
ggggaaataagagagaaaagaagagtaagaagaaatataagagccaccatgtcaccgcaacgagaccggataaatgccttctacaaagataacccttatcccaagggaagtaggatagttattaacagagaacatcttatgattgacagaccctatgttctgctggctgttctgttcgtcatgtttctgagcttgatcggattgctggcaattgcaggcattagacttcatcgggcagccatctacaccgcggagatccataaaagcctcagtaccaatctggatgtgactaactccatcgagcatcaggtcaaggacgtgctgacaccactctttaaaatcatcggggatgaagtgggcctgagaacacctcagagattcactgacctagtgaaattcatctcggacaagattaaattccttaatccggatagggagtacgacttcagagatctcacttggtgcatcaacccgccagagaggatcaaactagattatgatcaatactgtgcagatgtggctgctgaagagctcatgaatgcattggtgaactcaactctactggagaccagaacaaccactcagttcctagctgtctcaaagggaaactgctcagggcccactacaatcagaggtcaattctcaaacatgtcgctgtccttgttggacttgtacttaggtcgaggttacaatgtgtcatctatagtcactatgacatcccagggaatgtatgggggaacctacctagttgaaaagcctaatctgaacagcaaagggtcagagttgtcacaactgagcatgtaccgagtgtttgaagtaggtgtgatcagaaacccgggtttgggggctccggtgttccatatgacaaactattttgagcaaccagtcagtaatggtctcggcaactgtatggtggctttgggggagctcaaactcgcagccctttgtcacggggacgattctatcataattccctatcagggatcagggaaaggtgtcagcttccagctcgtcaagctgggtgtctggaaatccccaaccgacatgcaatcctgggtccccttatcaacggatgatccagtggtagacaggctttacctctcatctcacagaggtgtcatcgctgacaatcaagcaaaatgggctgtcccgacaacacgaacagatgacaagttgcgaatggagacatgcttccagcaggcgtgtaaaggtaaaatccaagcactctgcgagaatcccgagtgggtaccattgaaggataacaggattccttcatacggggtcctgtctgttgatctgagtctgacggttgagcttaaaatcaaaattgcttcgggattcgggccattgatcacacacggctcagggatggacctatacaaatccaactgcaacaatgtgtattggctgactattccgccaatgagaaatctagccttaggcgtaatcaacacattggagtggataccgagattcaaggttagtcccaacctcttcactgtcccaattaaggaagcaggcgaagactgccatgccccaacatacctacctgcggaggtggacggtgatgtcaaactcagttccaacctggtgattctacctggtcaagatctccaatatgttttggcaacctacgatacctccagggttgagcatgctgtggtttattacgtttacagcccaagccgctcattttcttacttttatccttttaggttgcctataaagggggtcccaatcgaactacaagtggaatgcttcacatgggatcaaaaactctggtgccgtcacttctgtgtgcttgcggactcagaatccggtggacttatcactcactctgggatggtgggcatgggagtcagctgcacagctacccgggaagatggaaccaatcgcagataatgataataggctggagcctcggtggccaagcttcttgccccttgggcctccccccagcccctcctccccttcctgcacccgtacccccgtggtctttgaataaagtctgagtgggcggcaaaaaaaaaaaaaaaaaaaaaaaaaaaaaaaaaaaaaaaaaaaaaaaaaaaaaaaaaaaaaaaaaaaaaaaaaaaaaaaaaaaaaaaaaaaaaaaaaaaatctag

SEQ ID NO: 78 - RNA, 2065 nt, synthetic construct
  misc_feature 1..2065: note = Synthetic Polynucleotide
  source 1..2065: mol_type = other RNA
tcaagcttttggaccctcgtacagaagctaatacgactcactatagggaaataagagagaaaagaagagtaagaagaaatataagagccaccatgtcaccacaacgagaccggataaatgccttctacaaagacaacccccatcctaagggaagtaggatagttattaacagagaacatcttatgattgatagaccttatgttttgctggctgttctattcgtcatgtttctgagcttgatcgggttgctagccattgcaggcattagacttcatcgggcagccatctacaccgcagagatccataaaagcctcagcaccaatctggatgtaactaactcaatcgagcatcaggttaaggacgtgctgacaccactcttcaagatcatcggtgatgaagtgggcttgaggacacctcagagattcactgacctagtgaagttcatctctgacaagattaaattccttaatccggacagggaatacgacttcagagatctcacttggtgtatcaacccgccagagagaatcaaattggattatgatcaatactgtgcagatgtggctgctgaagaactcatgaatgcattggtgaactcaactctactggagaccagggcaaccaatcagttcctagctgtctcaaagggaaactgctcagggcccactacaatcagaggccaattctcaaacatgtcgctgtccctgttggacttgtatttaagtcgaggttacaatgtgtcatctatagtcactatgacatcccagggaatgtacgggggaacttacctagtggaaaagcctaatctgagcagcaaagggtcagagttgtcacaactgagcatgcaccgagtgtttgaagtaggtgttatcagaaatccgggtttgggggctccggtattccatatgacaaactatcttgagcaaccagtcagtaatgatttcagcaactgcatggtggctttgggggagctcaagttcgcagccctctgtcacagggaagattctatcacaattccctatcagggatcagggaaaggtgtcagcttccagcttgtcaagctaggtgtctggaaatccccaaccgacatgcaatcctgggtccccctatcaacggatgatccagtgatagacaggctttacctctcatctcacagaggcgttatcgctgacaatcaagcaaaatgggctgtcccgacaacacggacagatgacaagttgcgaatggagacatgcttccagcaggcgtgtaagggtaaaatccaagcactttgcgagaatcccgagtggacaccattgaaggataacaggattccttcatacggggtcttgtctgttgatctgagtctgacagttgagcttaaaatcaaaattgtttcaggattcgggccattgatcacacacggttcagggatggacctatacaaatccaaccacaacaatatgtattggctgactatcccgccaatgaagaacctggccttaggtgtaatcaacacattggagtggataccgagattcaaggttagtcccaacctcttcactgttccaattaaggaagcaggcgaggactgccatgccccaacatacctacctgcggaggtggatggtgatgtcaaactcagttccaatctggtgattctacctggtcaagatctccaatatgttctggcaacctacgatacttccagagttgaacatgctgtagtttattacgtttacagcccaagccgctcattttcttacttttatccttttaggttgcctgtaaggggggtccccattgaattacaagtggaatgcttcacatgggaccaaaaactctggtgccgtcacttctgtgtgcttgcggactcagaatctggtggacatatcactcactctgggatggtgggcatgggagtcagctgcacagccactcgggaagatggaaccagccgcagatagtgataataggctggagcctcggtggccaagcttcttgccccttgggcctccccccagcccctcctccccttcctgcacccgtacccccgtggtctttgaataaagtctgagtgggcggc

SEQ ID NO: 79 - RNA, 1854 nt, synthetic construct
  misc_feature 1..1854: note = Synthetic Polynucleotide
  source 1..1854: mol_type = other RNA
atgtcaccacaacgagaccggataaatgccttctacaaagacaacccccatcctaagggaagtaggatagttattaacagagaacatcttatgattgatagaccttatgttttgctggctgttctattcgtcatgtttctgagcttgatcgggttgctagccattgcaggcattagacttcatcgggcagccatctacaccgcagagatccataaaagcctcagcaccaatctggatgtaactaactcaatcgagcatcaggttaaggacgtgctgacaccactcttcaagatcatcggtgatgaagtgggcttgaggacacctcagagattcactgacctagtgaagttcatctctgacaagattaaattccttaatccggacagggaatacgacttcagagatctcacttggtgtatcaacccgccagagagaatcaaattggattatgatcaatactgtgcagatgtggctgctgaagaactcatgaatgcattggtgaactcaactctactggagaccagggcaaccaatcagttcctagctgtctcaaagggaaactgctcagggcccactacaatcagaggccaattctcaaacatgtcgctgtccctgttggacttgtatttaagtcgaggttacaatgtgtcatctatagtcactatgacatcccagggaatgtacgggggaacttacctagtggaaaagcctaatctgagcagcaaagggtcagagttgtcacaactgagcatgcaccgagtgtttgaagtaggtgttatcagaaatccgggtttgggggctccggtattccatatgacaaactatcttgagcaaccagtcagtaatgatttcagcaactgcatggtggctttgggggagctcaagttcgcagccctctgtcacagggaagattctatcacaattccctatcagggatcagggaaaggtgtcagcttccagcttgtcaagctaggtgtctggaaatccccaaccgacatgcaatcctgggtccccctatcaacggatgatccagtgatagacaggctttacctctcatctcacagaggcgttatcgctgacaatcaagcaaaatgggctgtcccgacaacacggacagatgacaagttgcgaatggagacatgcttccagcaggcgtgtaagggtaaaatccaagcactttgcgagaatcccgagtggacaccattgaaggataacaggattccttcatacggggtcttgtctgttgatctgagtctgacagttgagcttaaaatcaaaattgtttcaggattcgggccattgatcacacacggttcagggatggacctatacaaatccaaccacaacaatatgtattggctgactatcccgccaatgaagaacctggccttaggtgtaatcaacacattggagtggataccgagattcaaggttagtcccaacctcttcactgttccaattaaggaagcaggcgaggactgccatgccccaacatacctacctgcggaggtggatggtgatgtcaaactcagttccaatctggtgattctacctggtcaagatctccaatatgttctggcaacctacgatacttccagagttgaacatgctgtagtttattacgtttacagcccaagccgctcattttcttacttttatccttttaggttgcctgtaaggggggtccccattgaattacaagtggaatgcttcacatgggaccaaaaactctggtgccgtcacttctgtgtgcttgcggactcagaatctggtggacatatcactcactctgggatggtgggcatgggagtcagctgcacagccactcgggaagatggaaccagccgcagatag

SEQ ID NO: 80 - RNA, 2126 nt, synthetic construct
  misc_feature 1..2126: note = Synthetic Polynucleotide
  source 1..2126: mol_type = other RNA
ggggaaataagagagaaaagaagagtaagaagaaatataagagccaccatgtcaccacaacgagaccggataaatgccttctacaaagacaacccccatcctaagggaagtaggatagttattaacagagaacatcttatgattgatagaccttatgttttgctggctgttctattcgtcatgtttctgagcttgatcgggttgctagccattgcaggcattagacttcatcgggcagccatctacaccgcagagatccataaaagcctcagcaccaatctggatgtaactaactcaatcgagcatcaggttaaggacgtgctgacaccactcttcaagatcatcggtgatgaagtgggcttgaggacacctcagagattcactgacctagtgaagttcatctctgacaagattaaattccttaatccggacagggaatacgacttcagagatctcacttggtgtatcaacccgccagagagaatcaaattggattatgatcaatactgtgcagatgtggctgctgaagaactcatgaatgcattggtgaactcaactctactggagaccagggcaaccaatcagttcctagctgtctcaaagggaaactgctcagggcccactacaatcagaggccaattctcaaacatgtcgctgtccctgttggacttgtatttaagtcgaggttacaatgtgtcatctatagtcactatgacatcccagggaatgtacgggggaacttacctagtggaaaagcctaatctgagcagcaaagggtcagagttgtcacaactgagcatgcaccgagtgtttgaagtaggtgttatcagaaatccgggtttgggggctccggtattccatatgacaaactatcttgagcaaccagtcagtaatgatttcagcaactgcatggtggctttgggggagctcaagttcgcagccctctgtcacagggaagattctatcacaattccctatcagggatcagggaaaggtgtcagcttccagcttgtcaagctaggtgtctggaaatccccaaccgacatgcaatcctgggtccccctatcaacggatgatccagtgatagacaggctttacctctcatctcacagaggcgttatcgctgacaatcaagcaaaatgggctgtcccgacaacacggacagatgacaagttgcgaatggagacatgcttccagcaggcgtgtaagggtaaaatccaagcactttgcgagaatcccgagtggacaccattgaaggataacaggattccttcatacggggtcttgtctgttgatctgagtctgacagttgagcttaaaatcaaaattgtttcaggattcgggccattgatcacacacggttcagggatggacctatacaaatccaaccacaacaatatgtattggctgactatcccgccaatgaagaacctggccttaggtgtaatcaacacattggagtggataccgagattcaaggttagtcccaacctcttcactgttccaattaaggaagcaggcgaggactgccatgccccaacatacctacctgcggaggtggatggtgatgtcaaactcagttccaatctggtgattctacctggtcaagatctccaatatgttctggcaacctacgatacttccagagttgaacatgctgtagtttattacgtttacagcccaagccgctcattttcttacttttatccttttaggttgcctgtaaggggggtccccattgaattacaagtggaatgcttcacatgggaccaaaaactctggtgccgtcacttctgtgtgcttgcggactcagaatctggtggacatatcactcactctgggatggtgggcatgggagtcagctgcacagccactcgggaagatggaaccagccgcagatagtgataataggctggagcctcggtggccaagcttcttgccccttgggcctccccccagcccctcctccccttcctgcacccgtacccccgtggtctttgaataaagtctgagtgggcggcaaaaaaaaaaaaaaaaaaaaaaaaaaaaaaaaaaaaaaaaaaaaaaaaaaaaaaaaaaaaaaaaaaaaaaaaaaaaaaaaaaaaaaaaaaaaaaaaaaaatctag

SEQ ID NO: 81 - RNA, 1729 nt, synthetic construct
  misc_feature 1..1729: note = Synthetic Polynucleotide
  source 1..1729: mol_type = other RNA
tcaagcttttggaccctcgtacagaagctaatacgactcactatagggaaataagagagaaaagaagagtaagaagaaatataagagccaccatggcacaagtcattaatacaaacagcctgtcgctgttgacccagaataacctgaacaaatcccagtccgcactgggcactgctatcgagcgtttgtcttccggtctgcgtatcaacagcgcgaaagacgatgcggcaggacaggcgattgctaaccgttttaccgcgaacatcaaaggtctgactcaggcttcccgtaacgctaacgacggtatctccattgcgcagaccactgaaggcgcgctgaacgaaatcaacaacaacctgcagcgtgtgcgtgaactggcggttcagtctgcgaatggtactaactcccagtctgacctcgactccatccaggctgaaatcacccagcgcctgaacgaaatcgaccgtgtatccggccagactcagttcaacggcgtgaaagtcctggcgcaggacaacaccctgaccatccaggttggtgccaacgacggtgaaactatcgatattgatttaaaagaaatcagctctaaaacactgggacttgataagcttaatgtccaagatgcctacaccccgaaagaaactgctgtaaccgttgataaaactacctataaaaatggtacagatcctattacagcccagagcaatactgatatccaaactgcaattggcggtggtgcaacgggggttactggggctgatatcaaatttaaagatggtcaatactatttagatgttaaaggcggtgcttctgctggtgtttataaagccacttatgatgaaactacaaagaaagttaatattgatacgactgataaaactccgttggcaactgcggaagctacagctattcggggaacggccactataacccacaaccaaattgctgaagtaacaaaagagggtgttgatacgaccacagttgcggctcaacttgctgcagcaggggttactggcgccgataaggacaatactagccttgtaaaactatcgtttgaggataaaaacggtaaggttattgatggtggctatgcagtgaaaatgggcgacgatttctatgccgctacatatgatgagaaaacaggtgcaattactgctaaaaccactacttatacagatggtactggcgttgctcaaactggagctgtgaaatttggtggcgcaaatggtaaatctgaagttgttactgctaccgatggtaagacttacttagcaagcgaccttgacaaacataacttcagaacaggcggtgagcttaaagaggttaatacagataagactgaaaacccactgcagaaaattgatgctgccttggcacaggttgatacacttcgttctgacctgggtgcggttcagaaccgtttcaactccgctatcaccaacctgggcaataccgtaaataacctgtcttctgcccgtagccgtatcgaagattccgactacgcaaccgaagtctccaacatgtctcgcgcgcagattctgcagcaggccggtacctccgttctggcgcaggcgaaccaggttccgcaaaacgtcctctctttactgcgttgataataggctggagcctcggtggccatgcttcttgccccttgggcctccccccagcccctcctccccttcctgcacccgtacccccgtggtctttgaataaagtctgagtgggcggc

SEQ ID NO: 82 - RNA, 1518 nt, synthetic construct
  misc_feature 1..1518: note = Synthetic Polynucleotide
  source 1..1518: mol_type = other RNA
atggcacaagtcattaatacaaacagcctgtcgctgttgacccagaataacctgaacaaatcccagtccgcactgggcactgctatcgagcgtttgtcttccggtctgcgtatcaacagcgcgaaagacgatgcggcaggacaggcgattgctaaccgttttaccgcgaacatcaaaggtctgactcaggcttcccgtaacgctaacgacggtatctccattgcgcagaccactgaaggcgcgctgaacgaaatcaacaacaacctgcagcgtgtgcgtgaactggcggttcagtctgcgaatggtactaactcccagtctgacctcgactccatccaggctgaaatcacccagcgcctgaacgaaatcgaccgtgtatccggccagactcagttcaacggcgtgaaagtcctggcgcaggacaacaccctgaccatccaggttggtgccaacgacggtgaaactatcgatattgatttaaaagaaatcagctctaaaacactgggacttgataagcttaatgtccaagatgcctacaccccgaaagaaactgctgtaaccgttgataaaactacctataaaaatggtacagatcctattacagcccagagcaatactgatatccaaactgcaattggcggtggtgcaacgggggttactggggctgatatcaaatttaaagatggtcaatactatttagatgttaaaggcggtgcttctgctggtgtttataaagccacttatgatgaaactacaaagaaagttaatattgatacgactgataaaactccgttggcaactgcggaagctacagctattcggggaacggccactataacccacaaccaaattgctgaagtaacaaaagagggtgttgatacgaccacagttgcggctcaacttgctgcagcaggggttactggcgccgataaggacaatactagccttgtaaaactatcgtttgaggataaaaacggtaaggttattgatggtggctatgcagtgaaaatgggcgacgatttctatgccgctacatatgatgagaaaacaggtgcaattactgctaaaaccactacttatacagatggtactggcgttgctcaaactggagctgtgaaatttggtggcgcaaatggtaaatctgaagttgttactgctaccgatggtaagacttacttagcaagcgaccttgacaaacataacttcagaacaggcggtgagcttaaagaggttaatacagataagactgaaaacccactgcagaaaattgatgctgccttggcacaggttgatacacttcgttctgacctgggtgcggttcagaaccgtttcaactccgctatcaccaacctgggcaataccgtaaataacctgtcttctgcccgtagccgtatcgaagattccgactacgcaaccgaagtctccaacatgtctcgcgcgcagattctgcagcaggccggtacctccgttctggcgcaggcgaaccaggttccgcaaaacgtcctctctttactgcgt

SEQ ID NO: 83 - RNA, 1790 nt, synthetic construct; identical to SEQ ID NO: 53
  misc_feature 1..1790: note = Synthetic Polynucleotide
  source 1..1790: mol_type = other RNA

SEQ ID NO: 84 - protein, 13 aa, Salmonella typhimurium
LQRVRELAVQSAN

SEQ ID NO: 85 - protein, 539 aa, synthetic construct
  REGION 1..539: note = Synthetic Polypeptide
MSWKVVIIFSLLITPQHGLKESYLEESCSTITEGYLSVLRTGWYTNVFTLEVGDVENLTCSDGPSLIKTELDLTKSALRELKTVSADQLAREEQIENPGSGSFVLGAIALGVAAAAAVTAGVAICKTIRLESEVTAINNALKKTNEAVSTLGNGVRVLAFAVRELKDFVSKNLTRALNKNKCDIDDLKMAVSFSQFNRRFLNVVRQFSDNAGITPAISLDLMTDAELARAVPNMPTSAGQIKLMLENRAMVRRKGFGILCGVYGSSVIYMVQLPIFGVIDTPCWIVKAAPSCSEKKGNYACLLREDQGWYCQNAGSTVYYPNEKDCETRGDHVFCDTAAGINVAEQSKECNINISTTNYPCKVSTGRHPISMVALSPLGALVACYKGVSCSIGSNRVGIIKQLNKGCSYITNQDADTVTIDNTVYQLSKVEGEQHVIKGRPVSSSFDPIKFPEDQFNVALDQVFENIENSQALVDQSNRILSSAEKGNTGFIIVIILIAVLGSSMILVSIFIIIKKTKKPTGAPPELSGVTNNGFIPHN

SEQ ID NO: 86 - protein, 539 aa, synthetic construct
  REGION 1..539: note = Synthetic Polypeptide
MSWKVVIIFSLLITPQHGLKESYLEESCSTITEGYLSVLRTGWYTNVFTLEVGDVENLTCSDGPSLIKTELDLTKSALRELKTVSADQLAREEQIENPGSGSFVLGAIALGVAAAAAVTAGVAICKTIRLESEVTAINNALKKTNEAVSTLGNGVRVLATAVRELKDFVSKNLTRAINKNKCDIDDLKMAVSFSQFNRRFLNVVRQFSDNAGITPAISLDLMTDAELARAVPNMPTSAGQIKLMLENRAMVRRKGFGILCGVYGSSVIYMVQLPIFGVIDTPCWIVKAAPSCSEKKGNYACLLREDQGWYCQNAGSTVYYPNEKDCETRGDHVFCDTAAGINVAEQSKECNINISTTNYPCKVSTGRHPISMVALSPLGALVACYKGVSCSIGSNRVGIIKQLNKGCSYITNQDADTVTIDNTVYQLSKVEGEQHVIKGRPVSSSFDPIKFPEHQWHVALDQVFENIENSQALVDQSNRILSSAEKGNTGFIIVIILIAVLGSSMILVSIFIIIKKTKKPTGAPPELSGVTNNGFIPHN

SEQ ID NO: 87 - protein, 539 aa, synthetic construct
  REGION 1..539: note = Synthetic Polypeptide
MSWKVVIIFSLLITPQHGLKESYLEESCSTITEGYLSVLRTGWYTNVFTLEVGDVENLTCSDGPSLIKTELDLLKSALRELKTVSADQLAREEQIENPGSGSFVLGAIALGVAAAAAVTAGVAIAKTIRLESEVTAINNALKKTNEAVSTLGNGVRVLATAVRELKDFVSKNLTRAINKNKCDIPDLKMAVSFSQFNRRFLNVVRQFSDNAGITPAISLDLMTDAELARAVPNMPTSAGQIKLMLENRAMVRRKGFGILIGVYGSSVIYMVQLPIFGVIDTPCWIVKAAPSCSEKKGNYACLLREDQGWYCQNAGSTVYYPNEKDCETRGDHVFCDTAAGINVAEQSKECNINISTTNYPCKVSTGRHPISMVALSPLGALVACYKGVSCSIGSNRVGIIKQLNKGCSYITNQDADTVTIDNTVYQLSKVEGEQHVIKGRPVSSSFDPIKFPEDQFQVALDQVFENIENSQALVDQSNRILSSAEKGNTGFIIVIILIAVLGSSMILVSIFIIIKKTKKPTGAPPELSGVTNNGFIPHN

SEQ ID NO: 88 - protein, 539 aa, synthetic construct
  REGION 1..539: note = Synthetic Polypeptide
MSWKVVIIFSLLITPQHGLKESYLEESCSTITEGYLSVLRTGWYTNVFTLEVGDVENLTCSDGPSLIKTELDLLKSALRELKTVSADQLAREEQIENPGSGSFVLGAIALGVAAAAAVTAGVAIAKTIRLESEVTAINNALKKTNEAVSTLGNGVRVLATAVRELKDFVSKNLTRAINKNKCDIPDLKMAVSFSQFNRRFLNVVRQFSDNAGITPAISLDLMTDAELARAVPNMPTSAGQIKLMLENRAMVRRKGFGILIGVYGSSVIYMVQLPIFGVIDTPCWIVKAAPSCSEKKGNYACLLREDQGWYCQNAGSTVYYPNEKDCETRGDHVFCDTAAGINVAEQSKECNINISTTNYPCKVSTGRHPISMVALSPLGALVACYKGVSCSIGSNRVGIIKQLNKGCSYITNQDADTVTIDNTVYQLSKVEGEQHVIKGRPVSSSFDPIKFPENQFQVALDQVFENIENSQALVDQSNRILSSAEKGNTGFIIVIILIAVLGSSMILVSIFIIIKKTKKPTGAPPELSGVTNNGFIPHN

SEQ ID NO: 89 - protein, 539 aa, synthetic construct
  REGION 1..539: note = Synthetic Polypeptide
MSWKVVIIFSLLITPQHGLKESYLEESCSTITEGYLSVLRTGWYTNVFTLEVGDVENLTCSDGPSLIKTELDLLKSALRELKTVSADQLAREEQIENPGSGSFVLGAIALGVAAAAAVTAGVAIAKTIRLESEVTAINNALKKTNEAVSTLGNGVRVLATAVRELKDFVLKNLTRAINKNKCDIPDLKMAVSFSQFNRRFLNVVRQFSDNAGITPAISLDLMTDAELARAVPNMPTSAGQIKLMLENRAMVRRKGFGILIGVYGSSVIYMVQLPIFGVIDTPCWIVKAAPSCSEKKGNYACLLREDQGWYCQNAGSTVYYPNEKDCETRGDHVFCDTAAGINVAEQSKECNINISTTNYPCKVSTGRHPISMVALSPLGALVACYKGVSCSIGSNRVGIIKQLNKGCSYITNQDADTVTIDNTVYQLSKVEGEQHVIKGRPVSSSFDPIKFPEDQFQVALDQVFENIENSQALVDQSNRILSSAEKGNTGFIIVIILIAVLGSSMILVSIFIIIKKTKKPTGAPPELSGVTNNGFIPHN

SEQ ID NO: 90 - protein, 539 aa, synthetic construct
  REGION 1..539: note = Synthetic Polypeptide
MSWKVVIIFSLLITPQHGLKESYLEESCSTITEGYLSVLRTGWYTNVFTLEVGDVENLTCSDGPSLIKTELDLLKSALRELKTVSADQLAREEQIENPGSGSFVLGAIALGVAAAAAVTAGVAIAKTIRLESEVTAINNALKKTNEAVSTLGNGVRVLATAVRELKDFVLKNLTRAINKNKCDIPDLKMAVSFSQFNRRFLNVVRQFSDNAGITPAISLDLMTDAELARAVPNMPTSAGQIKLMLENRAMVRRKGFGILIGVYGSSVIYMVQLPIFGVIDTPCWIVKAAPSCSEKKGNYACLLREDQGWYCQNAGSTVYYPNEKDCETRGDHVFCDTAAGINVAEQSKECNINISTTNYPCKVSTGRHPISMVALSPLGALVACYKGVSCSIGSNRVGIIKQLNKGCSYITNQDADTVTIDNTVYQLSKVEGEQHVIKGRPVSSSFDPIKFPENQFQVALDQVFENIENSQALVDQSNRILSSAEKGNTGFIIVIILIAVLGSSMILVSIFIIIKKTKKPTGAPPELSGVTNNGFIPHN

SEQ ID NO: 91 - protein, 539 aa, synthetic construct
  REGION 1..539: note = Synthetic Polypeptide
MSWKVVIIFSLLITPQHGLKESYLEESCSTITEGYLSVLRTGWYTNVFTLPVGDVENLTCSDGPSLIKTELDLLKSALRELKTVSADQLAREEQIENPGSGSFVLGAIALGVAAAAAVTAGVAIAKTIRLESEVTAINNALKKTNEAVSTLGNGVRVLATAVRELKDFVSKNLTRAINKNKCDIDDLKMAVSFSQFNRRFLNVVRQFSDNAGITPAISLDLMTDAELARAVPNMPTSAGQIKLMLENRAMVRRKGFGILIGVYGSSVIYMVQLPIFGVIDTPCWIVKAAPSCSEKKGNYACLLREDQGWYCQNAGSTVYYPNEKDCETRGDHVFCDTAAGINVAEQSKECNINISTTNYPCKVSTGRHPISMVALSPLGALVACYKGVSCSIGSNRVGIIKQLNKGCSYITNQDADTVTIDNTVYQLSKVEGEQHVIKGRPVSSSFDPIKFPEDQFQVALDQVFENIENSQALVDQSNRILSSAEKGNTGFIIVIILIAVLGSSMILVSIFIIIKKTKKPTGAPPELSGVTNNGFIPHN

SEQ ID NO: 92 - protein, 539 aa, synthetic construct
  REGION 1..539: note = Synthetic Polypeptide
MSWKVVIIFSLLITPQHGLKESYLEESCSTITEGYLSVLRTGWYTNVFTLPVGDVENLTCSDGPSLIKTELDLLKSALRELKTVSADQLAREEQIENPGSGSFVLGAIALGVAAAAAVTAGVAIAKTIRLESEVTAINNALKKTNEAVSTLGNGVRVLATAVRELKDFVSKNLTRAINKNKCDIDDLKMAVSFSQFNRRFLNVVRQFSDNAGITPAISLDLMTDAELARAVPNMPTSAGQIKLMLENRAMVRRKGFGILIGVYGSSVIYMVQLPIFGVIDTPCWIVKAAPSCSEKKGNYACLLREDQGWYCQNAGSTVYYPNEKDCETRGDHVFCDTAAGINVAEQSKECNINISTTNYPCKVSTGRHPISMVALSPLGALVACYKGVSCSIGSNRVGIIKQLNKGCSYITNQDADTVTIDNTVYQLSKVEGEQHVIKGRPVSSSFDPIKFPENQFQVALDQVFENIENSQALVDQSNRILSSAEKGNTGFIIVIILIAVLGSSMILVSIFIIIKKTKKPTGAPPELSGVTNNGFIPHN

SEQ ID NO: 93 - protein, 539 aa, synthetic construct
  REGION 1..539: note = Synthetic Polypeptide
MSWKVVIIFSLLITPQHGLKESYLEESCSTITEGYLSVLRTGWYTNVFTLEVGDVENLTCSDGPSLIKTELDLLKSALRELKTVSADQLAREEQIENPGSGSFVLGAIALGVAAAAAVTAGVAIAKTIRLESEVTAINNALKKTNEAVSTLGNGVRVLATAVRELKDFVSKNLTRAINKNKCDIDDLKMAVSFSQFNRRFLNVVRQFSDNAGITPAISLDLMTDAELARAVPNMPTSAGQIKLMLENRAMVRRKGFGILIGVYGSSVIYMVQLPIFGVIDTPCWIVKAAPSCSEKKGNYACLLREDQGWYCQNAGSTVYYPNEKDCETRGDHVFCDTAAGINVAEQSKECNINISTTNYPCKVSTGRHPISMVALSPLGALVACYKGVSCSIGSNRVGIIKQLNKGCSYITNQDADTVTIDNTVYQLSKVEGEQHVIKGRPVSSSFDPIKFPEDQFQVALDQVFENIENSQALVDQSNRILSSAEKGNTGFIIVIILIAVLGSSMILVSIFIIIKKTKKPTGAPPELSGVTNNGFIPHN

SEQ ID NO: 94 - protein, 539 aa, synthetic construct
  REGION 1..539: note = Synthetic Polypeptide
MSWKVVIIFSLLITPQHGLKESYLEESCSTITEGYLSVLRTGWYTNVFTLEVGDLENLTCSDGPSLIKTELDLTKSALRELKTVSADQLAREEQIENPGSGSFVLGAIALGVAAAAAVTAGVAIAKTIRLESEVTAINNALKKTNEAVSTLGNGVRVLATAVRELKDFVSKNLTRAINKNKCDIDDLKMAVSFSQFNRRFLNVVRQFSDNAGITPAISLDLMTDAELARAVPNMPTSAGQIKLMLENRAMVRRKGFGILIGVYGSSVIYMVQLPIFGVIDTPCWIVKAAPSCSEKKGNYACLLREDQGWYCQNAGSTVYYPNEKDCETRGDHVFCDTAAGINVAEQSKECNINISTTNYPCKVSTGRHPISMVALSPLGALVACYKGVSCSIGSNRVGIIKQLNKGCSYITNQDADTVTIDNTVYQLSKVEGEQHVIKGRPVSSSFDPIKFPEDQFQVALDQVFENIENSQALVDQSNRILSSAEKGNTGFIIVIILIAVLGSSMILVSIFIIIKKTKKPTGAPPELSGVTNNGFIPHN

SEQ ID NO: 95 - protein, 539 aa, synthetic construct
  REGION 1..539: note = Synthetic Polypeptide
MSWKVVIIFSLLITPQHGLKESYLEESCSTITEGYLSVLRTGWYTNVFTLEVGDVENLTCSDGPSLIKTELDLTKSALRELKTVSADQLAREEQIENPGSGSFVLGAIALGVAAAAAVTAGVAIAKTIRLESEVTAINNALKKTNEAVSTLGNGVRVLATAVRELKDFVLKNLTRAINKNKCDIDDLKMAVSFSQFNRRFLNVVRQFSDNAGITPAISLDLMTDAELARAVPNMPTSAGQIKLMLENRAMVRRKGFGILIGVYGSSVIYMVQLPIFGVIDTPCWIVKAAPSCSEKKGNYACLLREDQGWYCQNAGSTVYYPNEKDCETRGDHVFCDTAAGINVAEQSKECNINISTTNYPCKVSTGRHPISMVALSPLGALVACYKGVSCSIGSNRVGIIKQLNKGCSYITNQDADTVTIDNTVYQLSKVEGEQHVIKGRPVSSSFDPIKFPEDQFQVALDQVFENIENSQALVDQSNRILSSAEKGNTGFIIVIILIAVLGSSMILVSIFIIIKKTKKPTGAPPELSGVTNNGFIPHN

SEQ ID NO: 96 - protein, 539 aa, synthetic construct
  REGION 1..539: note = Synthetic Polypeptide
MSWKVVIIFSLLITPQHGLKESYLEESCSTITEGYLSVLRTGWYTNVFTLEVGDVENLTCSDGPSLIKTELDLTKSALRELKTVSADQLAREEQIENPGSGSFVLGAIALGVAAAAAVTAGVAIAKTIRLESEVTAINNALKKTNEAVSTLGNGVRVLATAVRELKDFVSKNLWRAINKNKCDIDDLKMAVSFSQFNRRFLNVVRQFSDNAGITPAISLDLMTDAELARAVPNMPTSAGQIKLMLENRAMVRRKGFGILIGVYGSSVIYMVQLPIFGVIDTPCWIVKAAPSCSEKKGNYACLLREDQGWYCQNAGSTVYYPNEKDCETRGDHVFCDTAAGINVAEQSKECNINISTTNYPCKVSTGRHPISMVALSPLGALVACYKGVSCSIGSNRVGIIKQLNKGCSYITNQDADTVTIDNTVYQLSKVEGEQHVIKGRPVSSSFDPIKFPEDQFQVALDQVFENIENSQALVDQSNRILSSAEKGNTGFIIVIILIAVLGSSMILVSIFIIIKKTKKPTGAPPELSGVTNNGFIPHN

SEQ ID NO: 97 - protein, 539 aa, synthetic construct
  REGION 1..539: note = Synthetic Polypeptide
MSWKVVIIFSLLITPQHGLKESYLEESCSTITEGYLSVLRTGWYTNVFTLEVGDLENLTCSDGPSLIKTELDLLKSALRELKTVSADQLAREEQIENPGSGSFVLGAIALGVAAAAAVTAGVAIAKTIRLESEVTAINNALKKTNEAVSTLGNGVRVLATAVRELKDFVLKNLWRAINKNKCDIDDLKMAVSFSQFNRRFLNVVRQFSDNAGITPAISLDLMTDAELARAVPNMPTSAGQIKLMLENRAMVRRKGFGILIGVYGSSVIYMVQLPIFGVIDTPCWIVKAAPSCSEKKGNYACLLREDQGWYCQNAGSTVYYPNEKDCETRGDHVFCDTAAGINVAEQSKECNINISTTNYPCKVSTGRHPISMVALSPLGALVACYKGVSCSIGSNRVGIIKQLNKGCSYITNQDADTVTIDNTVYQLSKVEGEQHVIKGRPVSSSFDPIKFPEDQFQVALDQVFENIENSQALVDQSNRILSSAEKGNTGFIIVIILIAVLGSSMILVSIFIIIKKTKKPTGAPPELSGVTNNGFIPHN

SEQ ID NO: 98 - protein, 539 aa, synthetic construct
  REGION 1..539: note = Synthetic Polypeptide
MSWKVVIIFSLLITPQHGLKESYLEESCSTITEGYLSVLRTGWYTNVFTLPVGDVENLTCSDGPSLIKTELDLTKSALRELKTVSADQLAREEQIENPGSGSFVLGAIALGVAAAAAVTAGVAIAKTIRLESEVTAINNALKKTNEAVSTLGNGVRVLATAVRELKDFVSKNLTRAINKNKCDIDDLKMAVSFSQFNRRFLNVVRQFSDNAGITPAISLDLMTDAELARAVPNMPTSAGQIKLMLENRAMVRRKGFGILIGVYGSSVIYMVQLPIFGVIDTPCWIVKAAPSCSEKKGNYACLLREDQGWYCQNAGSTVYYPNEKDCETRGDHVFCDTAAGINVAEQSKECNINISTTNYPCKVSTGRHPISMVALSPLGALVACYKGVSCSIGSNRVGIIKQLNKGCSYITNQDADTVTIDNTVYQLSKVEGEQHVIKGRPVSSSFDPIKFPEDQFQVALDQVFENIENSQALVDQSNRILSSAEKGNTGFIIVIILIAVLGSSMILVSIFIIIKKTKKPTGAPPELSGVTNNGFIPHN

SEQ ID NO: 99 - protein, 539 aa, synthetic construct
  REGION 1..539: note = Synthetic Polypeptide
MSWKVVIIFSLLITPQHGLKESYLEESCSTITEGYLSVLRTGWYTNVFTLEVGDVENLTCSDGPSLIKTELDLTKSALRELKTVSADQLAREEQIENPGSGSFVLGAIALGVAAAAAVTAGVAIAKTIRLESEVTAINNALKKTNEAVSTLGNGVRVLATAVRELKDFVSKNLTRAINKNKCDIPDLKMAVSFSQFNRRFLNVVRQFSDNAGITPAISLDLMTDAELARAVPNMPTSAGQIKLMLENRAMVRRKGFGILIGVYGSSVIYMVQLPIFGVIDTPCWIVKAAPSCSEKKGNYACLLREDQGWYCQNAGSTVYYPNEKDCETRGDHVFCDTAAGINVAEQSKECNINISTTNYPCKVSTGRHPISMVALSPLGALVACYKGVSCSIGSNRVGIIKQLNKGCSYITNQDADTVTIDNTVYQLSKVEGEQHVIKGRPVSSSFDPIKFPEDQFQVALDQVFENIENSQALVDQSNRILSSAEKGNTGFIIVIILIAVLGSSMILVSIFIIIKKTKKPTGAPPELSGVTNNGFIPHN

SEQ ID NO: 100 - protein, 539 aa, synthetic construct
  REGION 1..539: note = Synthetic Polypeptide
MSWKVVIIFSLLITPQHGLKESYLEESCSTITEGYLSVLRTGWYTNVFTLEVGDVENLTCSDGPSLIKTELDLTKSALRELKTVSADQLAREEQIENPGSGSFVLGAIALGVAAAAAVTAGVAIAKTIRLESEVTAINNALKKTNEAVSTLGNGVRVLATAVRELKDFVSKNLTRAINKNKCPIDDLKMAVSFSQFNRRFLNVVRQFSDNAGITPAISLDLMTDAELARAVPNMPTSAGQIKLMLENRAMVRRKGFGILIGVYGSSVIYMVQLPIFGVIDTPCWIVKAAPSCSEKKGNYACLLREDQGWYCQNAGSTVYYPNEKDCETRGDHVFCDTAAGINVAEQSKECNINISTTNYPCKVSTGRHPISMVALSPLGALVACYKGVSCSIGSNRVGIIKQLNKGCSYITNQDADTVTIDNTVYQLSKVEGEQHVIKGRPVSSSFDPIKFPEDQFQVALDQVFENIENSQALVDQSNRILSSAEKGNTGFIIVIILIAVLGSSMILVSIFIIIKKTKKPTGAPPELSGVTNNGFIPHN

SEQ ID NO: 101 - protein, 539 aa, synthetic construct
  REGION 1..539: note = Synthetic Polypeptide
MSWKVVIIFSLLITPQHGLKESYLEESCSTITEGYLSVLRTGWYTNVFTLEVGDVENLTCSDGPSLIKTELDLTKSALRELKTVSADQLAREEQIENPGSGSFVLGAIALGVAAAAAVTAGVAIAKTIRLPSEVTAINNALKKTNEAVSTLGNGVRVLATAVRELKDFVSKNLTRAINKNKCDIDDLKMAVSFSQFNRRFLNVVRQFSDNAGITPAISLDLMTDAELARAVPNMPTSAGQIKLMLENRAMVRRKGFGILIGVYGSSVIYMVQLPIFGVIDTPCWIVKAAPSCSEKKGNYACLLREDQGWYCQNAGSTVYYPNEKDCETRGDHVFCDTAAGINVAEQSKECNINISTTNYPCKVSTGRHPISMVALSPLGALVACYKGVSCSIGSNRVGIIKQLNKGCSYITNQDADTVTIDNTVYQLSKVEGEQHVIKGRPVSSSFDPIKFPEDQFQVALDQVFENIENSQALVDQSNRILSSAEKGNTGFIIVIILIAVLGSSMILVSIFIIIKKTKKPTGAPPELSGVTNNGFIPHN

SEQ ID NO: 102 - protein, 539 aa, synthetic construct
  REGION 1..539: note = Synthetic Polypeptide
MSWKVVIIFSLLITPQHGLKESYLEESCSTITEGYLSVLRTGWYTNVFTLEVGDVENLTCSDGPSLIKTELDLTKSALRELKTVSADQLAREEQIENPGSGSFVLGAIALGVAAAAAVTAGVAIAKTIRLESEVTAINNALKKTNEAVSTLGNGVRVLATAVRELKDFVSKNLTRAINKNKCDIDDLKMAVSFSQFNRRFLNVVRQFSDNAGITPAISLDLMTDAELARAVPNMPTSAGQIKLMLENRAMVRRKGFGILIGVYGSSVIYMVQLPIFGVIDTPCWIVKAAPSCSEKKGNYACLLREDQGWYCQNAGSTVYYPNEKDCETRGDHVFCDTAAGINVAEQSKECNINISTTNYPCKVSTGRHPISMVALSPLGALVACYKGVSCSIGSNRVGIIKQLNKGCSYITNQDADTVTIDNTVYQLSKVEGEQHVIKGRPVSSSFPPIKFPEDQFQVALDQVFENIENSQALVDQSNRILSSAEKGNTGFIIVIILIAVLGSSMILVSIFIIIKKTKKPTGAPPELSGVTNNGFIPHN

SEQ ID NO: 103 - protein, 539 aa, synthetic construct
  REGION 1..539: note = Synthetic Polypeptide
MSWKVVIIFSLLITPQHGLKESYLEESCSTITEGYLSVLRTGWYTNVFTLEVGDVENLTCSDGPSLIKTELDLTKSALRELKTVSADQLAREEQIENPGSGSFVLGAIALGVAAAAAVTAGVAIAKTIRLESEVTAINNALKKTNEAVSTLGNGVRVLATAVRELKDFVSKNLTRAINKNKCDIDDLKMAVSFSQFNRRFLNVVRQFSDNAGITPAISLDLMTDAELARAVPNMPTSAGQIKLMLENRAMVRRKGFGILIGVYGSSVIYMVQLPIFGVIDTPCWIVKAAPSCSEKKGNYACLLREDQGWYCQNAGSTVYYPNEKDCETRGDHVFCDTAAGINVAEQSKECNINISTTNYPCKVSTGRHPISMVALSPLGALVACYKGVSCSIGSNRVGIIKQLNKGCSYITNQDADTVTIDNTVYQLSKVEGEQHVIKGRPVSSSFDPIKFPENQFQVALDQVFENIENSQALVDQSNRILSSAEKGNTGFIIVIILIAVLGSSMILVSIFIIIKKTKKPTGAPPELSGVTNNGFIPHN

SEQ ID NO: 104 - protein, 539 aa, synthetic construct
  REGION 1..539: note = Synthetic Polypeptide
MSWKVVIIFSLLITPQHGLKESYLEESCSTITEGYLSVLRTGWYTNVFTLEVGDVENLTCSDGPSLIKTELDLTKSALRELKTVSADQLAREEQIENPGSGSFVLGAIALGVAAAAAVTAGVAIAKTIRLESEVTAINNALKKTNEAVSTLGNGVRVLATAVRELKDFVSKNLTRAINKNKCDIDDLKMAVSFSQFNRRFLNVVRQFSDNAGITPAISLDLMTDAELARAVPNMPTSAGQIKLMLENRAMVRRKGFGILIGVYGSSVIYMVQLPIFGVIDTPCWIVKAAPSCSEKKGNYACLLREDQGWYCQNAGSTVYYPNEKDCETRGDHVFCDTAAGINVAEQSKECNINISTTNYPCKVSTGRHPISMVALSPLGALVACYKGVSCSIGSNRVGIIKQLNKGCSYITNQDADTVTIDNTVYQLSKVEGEQHVIKGRPVSSSFDPIKFPQDQFQVALDQVFENIENSQALVDQSNRILSSAEKGNTGFIIVIILIAVLGSSMILVSIFIIIKKTKKPTGAPPELSGVTNNGFIPHN

SEQ ID NO: 105 - protein, 539 aa, synthetic construct
  REGION 1..539: note = Synthetic Polypeptide
MSWKVVIIFSLLITPQHGLKESYLEESCSTITEGYLSVLRTGWYTNVFTLEVGDVENLTCSDGPSLIKTELDLTKSALRELKTVSADQLAREEQIENPGSGSFVLGAIALGVAAAAAVTAGVAIAKTIRLESEVTAINNALKKTNEAVSTLGNGVRVLATAVRELKDFVSKNLTRAINKNKCDIDDLKMAVSFSQWNRRFLNVVRQFSDNAGITPAISLDLMTDAELARAVPNMPTSAGQIKLMLENRAMVRRKGFGILIGVYGSSVIYMVQLPIFGVIDTPCWIVKAAPSCSEKKGNYACLLREDQGWYCQNAGSTVYYPNEKDCETRGDHVFCDTAAGINVAEQSKECNINISTTNYPCKVSTGRHPISMVALSPLGALVACYKGVSCSIGSNRVGIIKQLNKGCSYITNQDADTVTIDNTVYQLSKVEGEQHVIKGRPVSSSFDPIKFPEDQFQVALDQVFENIENSQALVDQSNRILSSAEKGNTGFIIVIILIAVLGSSMILVSIFIIIKKTKKPTGAPPELSGVTNNGFIPHN

SEQ ID NO: 106 - DNA, 1617 bp, synthetic construct
  misc_feature 1..1617: note = Synthetic Polynucleotide
  source 1..1617: mol_type = other DNA
atgagctggaaggtggtcatcatcttcagcctgctgatcacacctcagcacggcctgaaagagagctacctggaagagtcctgcagcaccatcacagagggctacctgtctgtgctgagaaccggctggtacaccaacgtgttcacactggaagtgggcgacgtcgagaatctgacatgctctgatggccctagcctgatcaagaccgagctggatctgaccaagagcgccctgagagaactcaagaccgtgtctgccgatcagctggccagagaggaacagatcgagaatcctggcagcggcagctttgtgctgggagccattgctcttggagtggctgctgctgcagctgttacagcaggcgtggccatctgcaagaccatcagactggaaagcgaagtgaccgccatcaacaacgccctgaagaagacaaacgaggccgtcagcacactcggcaatggcgttagagtgctggcctttgccgtgcgcgagctgaaggacttcgtgtccaagaacctgacacgggccctgaacaagaacaagtgcgacatcgacgacctgaagatggccgtgtcctttagccagttcaaccggcggtttctgaacgtcgtgcggcagtttagcgacaacgccggaatcacaccagccatcagcctggacctgatgacagatgctgagctggctagagccgtgcctaacatgcctacatctgccggccagatcaagctgatgctcgagaatagagccatggtccgacggaaaggcttcggcattctgtgtggcgtgtacggcagcagcgtgatctatatggtgcagctgcctatcttcggcgtgatcgacacaccctgctggattgtgaaggccgctcctagctgtagcgagaagaagggcaattacgcctgcctgctgagagaggaccaaggctggtattgtcagaacgccggcagcaccgtgtactaccctaacgagaaggactgcgagacaagaggcgaccacgtgttctgtgataccgccgctggaatcaatgtggccgagcagagcaaagagtgcaacatcaacatcagcaccaccaactatccctgcaaggtgtccaccggcaggcaccctatttctatggtggctctgtctcctctgggagccctggtggcttgttataagggcgtgtcctgtagcatcggcagcaacagagtgggcatcatcaagcagctgaacaagggctgcagctacatcaccaaccaggacgccgataccgtgaccatcgacaacaccgtgtatcagctgagcaaggtggaaggcgaacagcacgtgatcaagggcagacctgtgtccagcagcttcgaccctatcaagttccctgaggatcagttcaacgtggccctggaccaggtgttcgagaacatcgagaattcccaggctctggtggaccagtccaacagaatcctgtctagcgccgagaagggaaacaccggcttcatcatcgtgatcatcctgatcgccgtgctgggcagctccatgatcctggtgtccatcttcatcattatcaagaagaccaagaagcccaccggcgctcctccagaactgagcggagtgaccaacaatggcttcatccctcacaac

SEQ ID NO: 107 - DNA, 1617 bp, synthetic construct
  misc_feature 1..1617: note = Synthetic Polynucleotide
  source 1..1617: mol_type = other DNA
atgagctggaaggtggtcatcatcttcagcctgctgatcacacctcagcacggcctgaaagagagctacctggaagagtcctgcagcaccatcacagagggctacctgtctgtgctgagaaccggctggtacaccaacgtgttcacactggaagtgggcgacgtcgagaatctgacatgctctgatggccctagcctgatcaagaccgagctggatctgaccaagagcgccctgagagaactcaagaccgtgtctgccgatcagctggccagagaggaacagatcgagaatcctggcagcggcagctttgtgctgggagccattgctcttggagtggctgctgctgcagctgttacagcaggcgtggccatctgcaagaccatcagactggaaagcgaagtgaccgccatcaacaacgccctgaagaagacaaacgaggccgtcagcacactcggcaatggcgttagagtgctggccacagccgtgcgcgagctgaaggacttcgtgtccaagaacctgacacgggccattaacaagaacaagtgcgacatcgacgacctgaagatggccgtgtcctttagccagttcaaccggcggtttctgaacgtcgtgcggcagtttagcgacaacgccggaatcacaccagccatcagcctggacctgatgacagatgctgagctggctagagccgtgcctaacatgcctacatctgccggccagatcaagctgatgctcgagaatagagccatggtccgacggaaaggcttcggcattctgtgtggcgtgtacggcagcagcgtgatctatatggtgcagctgcctatcttcggcgtgatcgacacaccctgctggattgtgaaggccgctcctagctgtagcgagaagaagggcaattacgcctgcctgctgagagaggaccaaggctggtattgtcagaacgccggcagcaccgtgtactaccctaacgagaaggactgcgagacaagaggcgaccacgtgttctgtgataccgccgctggaatcaatgtggccgagcagagcaaagagtgcaacatcaacatcagcaccaccaactatccctgcaaggtgtccaccggcaggcaccctatttctatggtggctctgtctcctctgggagccctggtggcttgttataagggcgtgtcctgtagcatcggcagcaacagagtgggcatcatcaagcagctgaacaagggctgcagctacatcaccaaccaggacgccgataccgtgaccatcgacaacaccgtgtatcagctgagcaaggtggaaggcgaacagcacgtgatcaagggcagacctgtgtccagcagcttcgaccctatcaagttccctgagcaccagtggcatgtggccctggaccaggtgttcgagaacatcgagaattcccaggctctggtggaccagtccaacagaatcctgtctagcgccgagaagggaaacaccggcttcatcatcgtgatcatcctgatcgccgtgctgggcagctccatgatcctggtgtccatcttcatcattatcaagaagaccaagaagcccaccggcgctcctccagaactgagcggagtgaccaacaatggcttcatccctcacaac

SEQ ID NO: 108 - DNA, 1617 bp, synthetic construct
  misc_feature 1..1617: note = Synthetic Polynucleotide
  source 1..1617: mol_type = other DNA
atgagctggaaggtggtcatcatcttcagcctgctgatcacacctcagcacggcctgaaagagagctacctggaagagtcctgcagcaccatcacagagggctacctgtctgtgctgagaaccggctggtacaccaacgtgttcacactggaagtgggcgacgtcgagaatctgacatgctctgatggccctagcctgatcaagaccgagctggatctgctcaagagcgccctgagagaactcaagaccgtgtctgccgatcagctggccagagaggaacagatcgagaatcctggcagcggcagctttgtgctgggagccattgctcttggagtggctgctgctgcagctgttacagcaggcgtggccatcgctaagaccatcagactggaaagcgaagtgaccgccatcaacaacgccctgaagaagacaaacgaggccgtcagcacactcggcaatggcgttagagtgctggccacagccgtgcgcgagctgaaggacttcgtgtccaagaacctgacacgggccattaacaagaacaagtgcgacatccctgacctgaagatggccgtgtcctttagccagttcaaccggcggtttctgaacgtcgtgcggcagtttagcgacaacgccggaatcacaccagccatcagcctggacctgatgacagatgctgagctggctagagccgtgcctaacatgcctacatctgccggccagatcaagctgatgctcgagaatagagccatggtccgacggaaaggcttcggcattctgattggcgtgtacggcagcagcgtgatctatatggtgcagctgcctatcttcggcgtgatcgacacaccctgctggattgtgaaggccgctcctagctgtagcgagaagaagggcaattacgcctgcctgctgagagaggaccaaggctggtattgtcagaacgccggcagcaccgtgtactaccctaacgagaaggactgcgagacaagaggcgaccacgtgttctgtgataccgccgctggaatcaatgtggccgagcagagcaaagagtgcaacatcaacatcagcaccaccaactatccctgcaaggtgtccaccggcaggcaccctatttctatggtggctctgtctcctctgggagccctggtggcttgttataagggcgtgtcctgtagcatcggcagcaacagagtgggcatcatcaagcagctgaacaagggctgcagctacatcaccaaccaggacgccgataccgtgaccatcgacaacaccgtgtatcagctgagcaaggtggaaggcgaacagcacgtgatcaagggcagacctgtgtccagcagcttcgaccctatcaagttccctgaggatcagttccaggtggccctggaccaggtgttcgagaacatcgagaattcccaggctctggtggaccagtccaacagaatcctgtctagcgccgagaagggaaacaccggcttcatcatcgtgatcatcctgatcgccgtgctgggcagctccatgatcctggtgtccatcttcatcattatcaagaagaccaagaagcccaccggcgctcctccagaactgagcggagtgaccaacaatggcttcatccctcacaac

SEQ ID NO: 109 - DNA, 1617 bp, synthetic construct
  misc_feature 1..1617: note = Synthetic Polynucleotide
  source 1..1617: mol_type = other DNA
atgagctggaaggtggtcatcatcttcagcctgctgatcacacctcagcacggcctgaaagagagctacctggaagagtcctgcagcaccatcacagagggctacctgtctgtgctgagaaccggctggtacaccaacgtgttcacactggaagtgggcgacgtcgagaatctgacatgctctgatggccctagcctgatcaagaccgagctggatctgctcaagagcgccctgagagaactcaagaccgtgtctgccgatcagctggccagagaggaacagatcgagaatcctggcagcggcagctttgtgctgggagccattgctcttggagtggctgctgctgcagctgttacagcaggcgtggccatcgctaagaccatcagactggaaagcgaagtgaccgccatcaacaacgccctgaagaagacaaacgaggccgtcagcacactcggcaatggcgttagagtgctggccacagccgtgcgcgagctgaaggacttcgtgtccaagaacctgacacgggccattaacaagaacaagtgcgacatccctgacctgaagatggccgtgtcctttagccagttcaaccggcggtttctgaacgtcgtgcggcagtttagcgacaacgccggaatcacaccagccatcagcctggacctgatgacagatgctgagctggctagagccgtgcctaacatgcctacatctgccggccagatcaagctgatgctcgagaatagagccatggtccgacggaaaggcttcggcattctgattggcgtgtacggcagcagcgtgatctatatggtgcagctgcctatcttcggcgtgatcgacacaccctgctggattgtgaaggccgctcctagctgtagcgagaagaagggcaattacgcctgcctgctgagagaggaccaaggctggtattgtcagaacgccggcagcaccgtgtactaccctaacgagaaggactgcgagacaagaggcgaccacgtgttctgtgataccgccgctggaatcaatgtggccgagcagagcaaagagtgcaacatcaacatcagcaccaccaactatccctgcaaggtgtccaccggcaggcaccctatttctatggtggctctgtctcctctgggagccctggtggcttgttataagggcgtgtcctgtagcatcggcagcaacagagtgggcatcatcaagcagctgaacaagggctgcagctacatcaccaaccaggacgccgataccgtgaccatcgacaacaccgtgtatcagctgagcaaggtggaaggcgaacagcacgtgatcaagggcagacctgtgtccagcagcttcgaccctatcaagttccctgagaaccagttccaggtggccctggaccaggtgttcgagaacatcgagaattcccaggctctggtggaccagtccaacagaatcctgtctagcgccgagaagggaaacaccggcttcatcatcgtgatcatcctgatcgccgtgctgggcagctccatgatcctggtgtccatcttcatcattatcaagaagaccaagaagcccaccggcgctcctccagaactgagcggagtgaccaacaatggcttcatccctcacaac

SEQ ID NO: 110 - DNA, 1617 bp, synthetic construct
  misc_feature 1..1617: note = Synthetic Polynucleotide
  source 1..1617: mol_type = other DNA
atgagctggaaggtggtcatcatcttcagcctgctgatcacacctcagcacggcctgaaagagagctacctggaagagtcctgcagcaccatcacagagggctacctgtctgtgctgagaaccggctggtacaccaacgtgttcacactggaagtgggcgacgtcgagaatctgacatgctctgatggccctagcctgatcaagaccgagctggatctgctcaagagcgccctgagagaactcaagaccgtgtctgccgatcagctggccagagaggaacagatcgagaatcctggcagcggcagctttgtgctgggagccattgctcttggagtggctgctgctgcagctgttacagcaggcgtggccatcgctaagaccatcagactggaaagcgaagtgaccgccatcaacaacgccctgaagaagacaaacgaggccgtcagcacactcggcaatggcgttagagtgctggccacagccgtgcgcgagctgaaggacttcgtgcttaagaacctgacacgggccattaacaagaacaagtgcgacatccctgacctgaagatggccgtgtcctttagccagttcaaccggcggtttctgaacgtcgtgcggcagtttagcgacaacgccggaatcacaccagccatcagcctggacctgatgacagatgctgagctggctagagccgtgcctaacatgcctacatctgccggccagatcaagctgatgctcgagaatagagccatggtccgacggaaaggcttcggcattctgattggcgtgtacggcagcagcgtgatctatatggtgcagctgcctatcttcggcgtgatcgacacaccctgctggattgtgaaggccgctcctagctgtagcgagaagaagggcaattacgcctgcctgctgagagaggaccaaggctggtattgtcagaacgccggcagcaccgtgtactaccctaacgagaaggactgcgagacaagaggcgaccacgtgttctgtgataccgccgctggaatcaatgtggccgagcagagcaaagagtgcaacatcaacatcagcaccaccaactatccctgcaaggtgtccaccggcaggcaccctatttctatggtggctctgtctcctctgggagccctggtggcttgttataagggcgtgtcctgtagcatcggcagcaacagagtgggcatcatcaagcagctgaacaagggctgcagctacatcaccaaccaggacgccgataccgtgaccatcgacaacaccgtgtatcagctgagcaaggtggaaggcgaacagcacgtgatcaagggcagacctgtgtccagcagcttcgaccctatcaagttccctgaggatcagttccaggtggccctggaccaggtgttcgagaacatcgagaattcccaggctctggtggaccagtccaacagaatcctgtctagcgccgagaagggaaacaccggcttcatcatcgtgatcatcctgatcgccgtgctgggcagctccatgatcctggtgtccatcttcatcattatcaagaagaccaagaagcccaccggcgctcctccagaactgagcggagtgaccaacaatggcttcatccctcacaac

SEQ ID NO: 111 - DNA, 1617 bp, synthetic construct
  misc_feature 1..1617: note = Synthetic Polynucleotide
  source 1..1617: mol_type = other DNA
atgagctggaaggtggtcatcatcttcagcctgctgatcacacctcagcacggcctgaaagagagctacctggaagagtcctgcagcaccatcacagagggctacctgtctgtgctgagaaccggctggtacaccaacgtgttcacactggaagtgggcgacgtcgagaatctgacatgctctgatggccctagcctgatcaagaccgagctggatctgctcaagagcgccctgagagaactcaagaccgtgtctgccgatcagctggccagagaggaacagatcgagaatcctggcagcggcagctttgtgctgggagccattgctcttggagtggctgctgctgcagctgttacagcaggcgtggccatcgctaagaccatcagactggaaagcgaagtgaccgccatcaacaacgccctgaagaagacaaacgaggccgtcagcacactcggcaatggcgttagagtgctggccacagccgtgcgcgagctgaaggacttcgtgcttaagaacctgacacgggccattaacaagaacaagtgcgacatccctgacctgaagatggccgtgtcctttagccagttcaaccggcggtttctgaacgtcgtgcggcagtttagcgacaacgccggaatcacaccagccatcagcctggacctgatgacagatgctgagctggctagagccgtgcctaacatgcctacatctgccggccagatcaagctgatgctcgagaatagagccatggtccgacggaaaggcttcggcattctgattggcgtgtacggcagcagcgtgatctatatggtgcagctgcctatcttcggcgtgatcgacacaccctgctggattgtgaaggccgctcctagctgtagcgagaagaagggcaattacgcctgcctgctgagagaggaccaaggctggtattgtcagaacgccggcagcaccgtgtactaccctaacgagaaggactgcgagacaagaggcgaccacgtgttctgtgataccgccgctggaatcaatgtggccgagcagagcaaagagtgcaacatcaacatcagcaccaccaactatccctgcaaggtgtccaccggcaggcaccctatttctatggtggctctgtctcctctgggagccctggtggcttgttataagggcgtgtcctgtagcatcggcagcaacagagtgggcatcatcaagcagctgaacaagggctgcagctacatcaccaaccaggacgccgataccgtgaccatcgacaacaccgtgtatcagctgagcaaggtggaaggcgaacagcacgtgatcaagggcagacctgtgtccagcagcttcgaccctatcaagttccctgagaaccagttccaggtggccctggaccaggtgttcgagaacatcgagaattcccaggctctggtggaccagtccaacagaatcctgtctagcgccgagaagggaaacaccggcttcatcatcgtgatcatcctgatcgccgtgctgggcagctccatgatcctggtgtccatcttcatcattatcaagaagaccaagaagcccaccggcgctcctccagaactgagcggagtgaccaacaatggcttcatccctcacaac

SEQ ID NO: 112 - DNA, 1617 bp, synthetic construct
  misc_feature 1..1617: note = Synthetic Polynucleotide
  source 1..1617: mol_type = other DNA
atgagctggaaggtggtcatcatcttcagcctgctgatcacacctcagcacggcctgaaagagagctacctggaagagtcctgcagcaccatcacagagggctacctgtctgtgctgagaaccggctggtacaccaacgtgttcacactgcctgtgggcgacgtcgagaatctgacatgctctgatggccctagcctgatcaagaccgagctggatctgctcaagagcgccctgagagaactcaagaccgtgtctgccgatcagctggccagagaggaacagatcgagaatcctggcagcggcagctttgtgctgggagccattgctcttggagtggctgctgctgcagctgttacagcaggcgtggccatcgctaagaccatcagactggaaagcgaagtgaccgccatcaacaacgccctgaagaagacaaacgaggccgtcagcacactcggcaatggcgttagagtgctggccacagccgtgcgcgagctgaaggacttcgtgtccaagaacctgacacgggccattaacaagaacaagtgcgacatcgacgacctgaagatggccgtgtcctttagccagttcaaccggcggtttctgaacgtcgtgcggcagtttagcgacaacgccggaatcacaccagccatcagcctggacctgatgacagatgctgagctggctagagccgtgcctaacatgcctacatctgccggccagatcaagctgatgctcgagaatagagccatggtccgacggaaaggcttcggcattctgattggcgtgtacggcagcagcgtgatctatatggtgcagctgcctatcttcggcgtgatcgacacaccctgctggattgtgaaggccgctcctagctgtagcgagaagaagggcaattacgcctgcctgctgagagaggaccaaggctggtattgtcagaacgccggcagcaccgtgtactaccctaacgagaaggactgcgagacaagaggcgaccacgtgttctgtgataccgccgctggaatcaatgtggccgagcagagcaaagagtgcaacatcaacatcagcaccaccaactatccctgcaaggtgtccaccggcaggcaccctatttctatggtggctctgtctcctctgggagccctggtggcttgttataagggcgtgtcctgtagcatcggcagcaacagagtgggcatcatcaagcagctgaacaagggctgcagctacatcaccaaccaggacgccgataccgtgaccatcgacaacaccgtgtatcagctgagcaaggtggaaggcgaacagcacgtgatcaagggcagacctgtgtccagcagcttcgaccctatcaagttccctgaggatcagttccaggtggccctggaccaggtgttcgagaacatcgagaattcccaggctctggtggaccagtccaacagaatcctgtctagcgccgagaagggaaacaccggcttcatcatcgtgatcatcctgatcgccgtgctgggcagctccatgatcctggtgtccatcttcatcattatcaagaagaccaagaagcccaccggcgctcctccagaactgagcggagtgaccaacaatggcttcatccctcacaac

SEQ ID NO: 113 - DNA, 1617 bp, synthetic construct
  misc_feature 1..1617: note = Synthetic Polynucleotide
  source 1..1617: mol_type = other DNA
atgagctggaaggtggtcatcatcttcagcctgctgatcacacctcagcacggcctgaaagagagctacctggaagagtcctgcagcaccatcacagagggctacctgtctgtgctgagaaccggctggtacaccaacgtgttcacactgcctgtgggcgacgtcgagaatctgacatgctctgatggccctagcctgatcaagaccgagctggatctgctcaagagcgccctgagagaactcaagaccgtgtctgccgatcagctggccagagaggaacagatcgagaatcctggcagcggcagctttgtgctgggagccattgctcttggagtggctgctgctgcagctgttacagcaggcgtggccatcgctaagaccatcagactggaaagcgaagtgaccgccatcaacaacgccctgaagaagacaaacgaggccgtcagcacactcggcaatggcgttagagtgctggccacagccgtgcgcgagctgaaggacttcgtgtccaagaacctgacacgggccattaacaagaacaagtgcgacatcgacgacctgaagatggccgtgtcctttagccagttcaaccggcggtttctgaacgtcgtgcggcagtttagcgacaacgccggaatcacaccagccatcagcctggacctgatgacagatgctgagctggctagagccgtgcctaacatgcctacatctgccggccagatcaagctgatgctcgagaatagagccatggtccgacggaaaggcttcggcattctgattggcgtgtacggcagcagcgtgatctatatggtgcagctgcctatcttcggcgtgatcgacacaccctgctggattgtgaaggccgctcctagctgtagcgagaagaagggcaattacgcctgcctgctgagagaggaccaaggctggtattgtcagaacgccggcagcaccgtgtactaccctaacgagaaggactgcgagacaagaggcgaccacgtgttctgtgataccgccgctggaatcaatgtggccgagcagagcaaagagtgcaacatcaacatcagcaccaccaactatccctgcaaggtgtccaccggcaggcaccctatttctatggtggctctgtctcctctgggagccctggtggcttgttataagggcgtgtcctgtagcatcggcagcaacagagtgggcatcatcaagcagctgaacaagggctgcagctacatcaccaaccaggacgccgataccgtgaccatcgacaacaccgtgtatcagctgagcaaggtggaaggcgaacagcacgtgatcaagggcagacctgtgtccagcagcttcgaccctatcaagttccctgagaaccagttccaggtggccctggaccaggtgttcgagaacatcgagaattcccaggctctggtggaccagtccaacagaatcctgtctagcgccgagaagggaaacaccggcttcatcatcgtgatcatcctgatcgccgtgctgggcagctccatgatcctggtgtccatcttcatcattatcaagaagaccaagaagcccaccggcgctcctccagaactgagcggagtgaccaacaatggcttcatccctcacaac

SEQ ID NO: 114 - DNA, 1617 bp, synthetic construct
  misc_feature 1..1617: note = Synthetic Polynucleotide
  source 1..1617: mol_type = other DNA
atgagctggaaggtggtcatcatcttcagcctgctgatcacacctcagcacggcctgaaagagagctacctggaagagtcctgcagcaccatcacagagggctacctgtctgtgctgagaaccggctggtacaccaacgtgttcacactggaagtgggcgacgtcgagaatctgacatgctctgatggccctagcctgatcaagaccgagctggatctgctcaagagcgccctgagagaactcaagaccgtgtctgccgatcagctggccagagaggaacagatcgagaatcctggcagcggcagctttgtgctgggagccattgctcttggagtggctgctgctgcagctgttacagcaggcgtggccatcgctaagaccatcagactggaaagcgaagtgaccgccatcaacaacgccctgaagaagacaaacgaggccgtcagcacactcggcaatggcgttagagtgctggccacagccgtgcgcgagctgaaggacttcgtgtccaagaacctgacacgggccattaacaagaacaagtgcgacatcgacgacctgaagatggccgtgtcctttagccagttcaaccggcggtttctgaacgtcgtgcggcagtttagcgacaacgccggaatcacaccagccatcagcctggacctgatgacagatgctgagctggctagagccgtgcctaacatgcctacatctgccggccagatcaagctgatgctcgagaatagagccatggtccgacggaaaggcttcggcattctgattggcgtgtacggcagcagcgtgatctatatggtgcagctgcctatcttcggcgtgatcgacacaccctgctggattgtgaaggccgctcctagctgtagcgagaagaagggcaattacgcctgcctgctgagagaggaccaaggctggtattgtcagaacgccggcagcaccgtgtactaccctaacgagaaggactgcgagacaagaggcgaccacgtgttctgtgataccgccgctggaatcaatgtggccgagcagagcaaagagtgcaacatcaacatcagcaccaccaactatccctgcaaggtgtccaccggcaggcaccctatttctatggtggctctgtctcctctgggagccctggtggcttgttataagggcgtgtcctgtagcatcggcagcaacagagtgggcatcatcaagcagctgaacaagggctgcagctacatcaccaaccaggacgccgataccgtgaccatcgacaacaccgtgtatcagctgagcaaggtggaaggcgaacagcacgtgatcaagggcagacctgtgtccagcagcttcgaccctatcaagttccctgaggatcagttccaggtggccctggaccaggtgttcgagaacatcgagaattcccaggctctggtggaccagtccaacagaatcctgtctagcgccgagaagggaaacaccggcttcatcatcgtgatcatcctgatcgccgtgctgggcagctccatgatcctggtgtccatcttcatcattatcaagaagaccaagaagcccaccggcgctcctccagaactgagcggagtgaccaacaatggcttcatccctcacaac

SEQ ID NO: 115 - DNA, 1617 bp, synthetic construct
  misc_feature 1..1617: note = Synthetic Polynucleotide
  source 1..1617: mol_type = other DNA
atgagctggaaggtggtcatcatcttcagcctgctgatcacacctcagcacggcctgaaagagagctacctggaagagtcctgcagcaccatcacagagggctacctgtctgtgctgagaaccggctggtacaccaacgtgttcacactggaagtgggcgacctcgagaatctgacatgctctgatggccctagcctgatcaagaccgagctggatctgaccaagagcgccctgagagaactcaagaccgtgtctgccgatcagctggccagagaggaacagatcgagaatcctggcagcggcagctttgtgctgggagccattgctcttggagtggctgctgctgcagctgttacagcaggcgtggccatcgctaagaccatcagactggaaagcgaagtgaccgccatcaacaacgccctgaagaagacaaacgaggccgtcagcacactcggcaatggcgttagagtgctggccacagccgtgcgcgagctgaaggacttcgtgtccaagaacctgacacgggccattaacaagaacaagtgcgacatcgacgacctgaagatggccgtgtcctttagccagttcaaccggcggtttctgaacgtcgtgcggcagtttagcgacaacgccggaatcacaccagccatcagcctggacctgatgacagatgctgagctggctagagccgtgcctaacatgcctacatctgccggccagatcaagctgatgctcgagaatagagccatggtccgacggaaaggcttcggcattctgattggcgtgtacggcagcagcgtgatctatatggtgcagctgcctatcttcggcgtgatcgacacaccctgctggattgtgaaggccgctcctagctgtagcgagaagaagggcaattacgcctgcctgctgagagaggaccaaggctggtattgtcagaacgccggcagcaccgtgtactaccctaacgagaaggactgcgagacaagaggcgaccacgtgttctgtgataccgccgctggaatcaatgtggccgagcagagcaaagagtgcaacatcaacatcagcaccaccaactatccctgcaaggtgtccaccggcaggcaccctatttctatggtggctctgtctcctctgggagccctggtggcttgttataagggcgtgtcctgtagcatcggcagcaacagagtgggcatcatcaagcagctgaacaagggctgcagctacatcaccaaccaggacgccgataccgtgaccatcgacaacaccgtgtatcagctgagcaaggtggaaggcgaacagcacgtgatcaagggcagacctgtgtccagcagcttcgaccctatcaagttccctgaggatcagttccaggtggccctggaccaggtgttcgagaacatcgagaattcccaggctctggtggaccagtccaacagaatcctgtctagcgccgagaagggaaacaccggcttcatcatcgtgatcatcctgatcgccgtgctgggcagctccatgatcctggtgtccatcttcatcattatcaagaagaccaagaagcccaccggcgctcctccagaactgagcggagtgaccaacaatggcttcatccctcacaac

SEQ ID NO: 116 - DNA, 1617 bp, synthetic construct
  misc_feature 1..1617: note = Synthetic Polynucleotide
  source 1..1617: mol_type = other DNA
atgagctggaaggtggtcatcatcttcagcctgctgatcacacctcagcacggcctgaaagagagctacctggaagagtcctgcagcaccatcacagagggctacctgtctgtgctgagaaccggctggtacaccaacgtgttcacactggaagtgggcgacgtcgagaatctgacatgctctgatggccctagcctgatcaagaccgagctggatctgaccaagagcgccctgagagaactcaagaccgtgtctgccgatcagctggccagagaggaacagatcgagaatcctggcagcggcagctttgtgctgggagccattgctcttggagtggctgctgctgcagctgttacagcaggcgtggccatcgctaagaccatcagactggaaagcgaagtgaccgccatcaacaacgccctgaagaagacaaacgaggccgtcagcacactcggcaatggcgttagagtgctggccacagccgtgcgcgagctgaaggacttcgtgcttaagaacctgacacgggccattaacaagaacaagtgcgacatcgacgacctgaagatggccgtgtcctttagccagttcaaccggcggtttctgaacgtcgtgcggcagtttagcgacaacgccggaatcacaccagccatcagcctggacctgatgacagatgctgagctggctagagccgtgcctaacatgcctacatctgccggccagatcaagctgatgctcgagaatagagccatggtccgacggaaaggcttcggcattctgattggcgtgtacggcagcagcgtgatctatatggtgcagctgcctatcttcggcgtgatcgacacaccctgctggattgtgaaggccgctcctagctgtagcgagaagaagggcaattacgcctgcctgctgagagaggaccaaggctggtattgtcagaacgccggcagcaccgtgtactaccctaacgagaaggactgcgagacaagaggcgaccacgtgttctgtgataccgccgctggaatcaatgtggccgagcagagcaaagagtgcaacatcaacatcagcaccaccaactatccctgcaaggtgtccaccggcaggcaccctatttctatggtggctctgtctcctctgggagccctggtggcttgttataagggcgtgtcctgtagcatcggcagcaacagagtgggcatcatcaagcagctgaacaagggctgcagctacatcaccaaccaggacgccgataccgtgaccatcgacaacaccgtgtatcagctgagcaaggtggaaggcgaacagcacgtgatcaagggcagacctgtgtccagcagcttcgaccctatcaagttccctgaggatcagttccaggtggccctggaccaggtgttcgagaacatcgagaattcccaggctctggtggaccagtccaacagaatcctgtctagcgccgagaagggaaacaccggcttcatcatcgtgatcatcctgatcgccgtgctgggcagctccatgatcctggtgtccatcttcatcattatcaagaagaccaagaagcccaccggcgctcctccagaactgagcggagtgaccaacaatggcttcatccctcacaac

SEQ ID NO: 117 - DNA, 1617 bp, synthetic construct
  misc_feature 1..1617: note = Synthetic Polynucleotide
  source 1..1617: mol_type = other DNA
atgagctggaaggtggtcatcatcttcagcctgctgatcacacctcagcacggcctgaaagagagctacctggaagagtcctgcagcaccatcacagagggctacctgtctgtgctgagaaccggctggtacaccaacgtgttcacactggaagtgggcgacgtcgagaatctgacatgctctgatggccctagcctgatcaagaccgagctggatctgaccaagagcgccctgagagaactcaagaccgtgtctgccgatcagctggccagagaggaacagatcgagaatcctggcagcggcagctttgtgctgggagccattgctcttggagtggctgctgctgcagctgttacagcaggcgtggccatcgctaagaccatcagactggaaagcgaagtgaccgccatcaacaacgccctgaagaagacaaacgaggccgtcagcacactcggcaatggcgttagagtgctggccacagccgtgcgcgagctgaaggacttcgtgtccaagaacctgtggcgggccattaacaagaacaagtgcgacatcgacgacctgaagatggccgtgtcctttagccagttcaaccggcggtttctgaacgtcgtgcggcagtttagcgacaacgccggaatcacaccagccatcagcctggacctgatgacagatgctgagctggctagagccgtgcctaacatgcctacatctgccggccagatcaagctgatgctcgagaatagagccatggtccgacggaaaggcttcggcattctgattggcgtgtacggcagcagcgtgatctatatggtgcagctgcctatcttcggcgtgatcgacacaccctgctggattgtgaaggccgctcctagctgtagcgagaagaagggcaattacgcctgcctgctgagagaggaccaaggctggtattgtcagaacgccggcagcaccgtgtactaccctaacgagaaggactgcgagacaagaggcgaccacgtgttctgtgataccgccgctggaatcaatgtggccgagcagagcaaagagtgcaacatcaacatcagcaccaccaactatccctgcaaggtgtccaccggcaggcaccctatttctatggtggctctgtctcctctgggagccctggtggcttgttataagggcgtgtcctgtagcatcggcagcaacagagtgggcatcatcaagcagctgaacaagggctgcagctacatcaccaaccaggacgccgataccgtgaccatcgacaacaccgtgtatcagctgagcaaggtggaaggcgaacagcacgtgatcaagggcagacctgtgtccagcagcttcgaccctatcaagttccctgaggatcagttccaggtggccctggaccaggtgttcgagaacatcgagaattcccaggctctggtggaccagtccaacagaatcctgtctagcgccgagaagggaaacaccggcttcatcatcgtgatcatcctgatcgccgtgctgggcagctccatgatcctggtgtccatcttcatcattatcaagaagaccaagaagcccaccggcgctcctccagaactgagcggagtgaccaacaatggcttcatccctcacaac

SEQ ID NO: 118 - DNA, 1617 bp, synthetic construct
  misc_feature 1..1617: note = Synthetic Polynucleotide
  source 1..1617: mol_type = other DNA
atgagctggaaggtggtcatcatcttcagcctgctgatcacacctcagcacggcctgaaagagagctacctggaagagtcctgcagcaccatcacagagggctacctgtctgtgctgagaaccggctggtacaccaacgtgttcacactggaagtgggcgacctcgagaatctgacatgctctgatggccctagcctgatcaagaccgagctggatctgctcaagagcgccctgagagaactcaagaccgtgtctgccgatcagctggccagagaggaacagatcgagaatcctggcagcggcagctttgtgctgggagccattgctcttggagtggctgctgctgcagctgttacagcaggcgtggccatcgctaagaccatcagactggaaagcgaagtgaccgccatcaacaacgccctgaagaagacaaacgaggccgtcagcacactcggcaatggcgttagagtgctggccacagccgtgcgcgagctgaaggacttcgtgcttaagaacctgtggcgggccattaacaagaacaagtgcgacatcgacgacctgaagatggccgtgtcctttagccagttcaaccggcggtttctgaacgtcgtgcggcagtttagcgacaacgccggaatcacaccagccatcagcctggacctgatgacagatgctgagctggctagagccgtgcctaacatgcctacatctgccggccagatcaagctgatgctcgagaatagagccatggtccgacggaaaggcttcggcattctgattggcgtgtacggcagcagcgtgatctatatggtgcagctgcctatcttcggcgtgatcgacacaccctgctggattgtgaaggccgctcctagctgtagcgagaagaagggcaattacgcctgcctgctgagagaggaccaaggctggtattgtcagaacgccggcagcaccgtgtactaccctaacgagaaggactgcgagacaagaggcgaccacgtgttctgtgataccgccgctggaatcaatgtggccgagcagagcaaagagtgcaacatcaacatcagcaccaccaactatccctgcaaggtgtccaccggcaggcaccctatttctatggtggctctgtctcctctgggagccctggtggcttgttataagggcgtgtcctgtagcatcggcagcaacagagtgggcatcatcaagcagctgaacaagggctgcagctacatcaccaaccaggacgccgataccgtgaccatcgacaacaccgtgtatcagctgagcaaggtggaaggcgaacagcacgtgatcaagggcagacctgtgtccagcagcttcgaccctatcaagttccctgaggatcagttccaggtggccctggaccaggtgttcgagaacatcgagaattcccaggctctggtggaccagtccaacagaatcctgtctagcgccgagaagggaaacaccggcttcatcatcgtgatcatcctgatcgccgtgctgggcagctccatgatcctggtgtccatcttcatcattatcaagaagaccaagaagcccaccggcgctcctccagaactgagcggagtgaccaacaatggcttcatccctcacaac

SEQ ID NO: 119 - DNA, 1617 bp, synthetic construct
  misc_feature 1..1617: note = Synthetic Polynucleotide
  source 1..1617: mol_type = other DNA
atgagctggaaggtggtcatcatcttcagcctgctgatcacacctcagcacggcctgaaagagagctacctggaagagtcctgcagcaccatcacagagggctacctgtctgtgctgagaaccggctggtacaccaacgtgttcacactgcctgtgggcgacgtcgagaatctgacatgctctgatggccctagcctgatcaagaccgagctggatctgaccaagagcgccctgagagaactcaagaccgtgtctgccgatcagctggccagagaggaacagatcgagaatcctggcagcggcagctttgtgctgggagccattgctcttggagtggctgctgctgcagctgttacagcaggcgtggccatcgctaagaccatcagactggaaagcgaagtgaccgccatcaacaacgccctgaagaagacaaacgaggccgtcagcacactcggcaatggcgttagagtgctggccacagccgtgcgcgagctgaaggacttcgtgtccaagaacctgacacgggccattaacaagaacaagtgcgacatcgacgacctgaagatggccgtgtcctttagccagttcaaccggcggtttctgaacgtcgtgcggcagtttagcgacaacgccggaatcacaccagccatcagcctggacctgatgacagatgctgagctggctagagccgtgcctaacatgcctacatctgccggccagatcaagctgatgctcgagaatagagccatggtccgacggaaaggcttcggcattctgattggcgtgtacggcagcagcgtgatctatatggtgcagctgcctatcttcggcgtgatcgacacaccctgctggattgtgaaggccgctcctagctgtagcgagaagaagggcaattacgcctgcctgctgagagaggaccaaggctggtattgtcagaacgccggcagcaccgtgtactaccctaacgagaaggactgcgagacaagaggcgaccacgtgttctgtgataccgccgctggaatcaatgtggccgagcagagcaaagagtgcaacatcaacatcagcaccaccaactatccctgcaaggtgtccaccggcaggcaccctatttctatggtggctctgtctcctctgggagccctggtggcttgttataagggcgtgtcctgtagcatcggcagcaacagagtgggcatcatcaagcagctgaacaagggctgcagctacatcaccaaccaggacgccgataccgtgaccatcgacaacaccgtgtatcagctgagcaaggtggaaggcgaacagcacgtgatcaagggcagacctgtgtccagcagcttcgaccctatcaagttccctgaggatcagttccaggtggccctggaccaggtgttcgagaacatcgagaattcccaggctctggtggaccagtccaacagaatcctgtctagcgccgagaagggaaacaccggcttcatcatcgtgatcatcctgatcgccgtgctgggcagctccatgatcctggtgtccatcttcatcattatcaagaagaccaagaagcccaccggcgctcctccagaactgagcggagtgaccaacaatggcttcatccctcacaac

SEQ ID NO: 120 - DNA, 1617 bp, synthetic construct
  misc_feature 1..1617: note = Synthetic Polynucleotide
  source 1..1617: mol_type = other DNA
atgagctggaaggtggtcatcatcttcagcctgctgatcacacctcagcacggcctgaaagagagctacctggaagagtcctgcagcaccatcacagagggctacctgtctgtgctgagaaccggctggtacaccaacgtgttcacactggaagtgggcgacgtcgagaatctgacatgctctgatggccctagcctgatcaagaccgagctggatctgaccaagagcgccctgagagaactcaagaccgtgtctgccgatcagctggccagagaggaacagatcgagaatcctggcagcggcagctttgtgctgggagccattgctcttggagtggctgctgctgcagctgttacagcaggcgtggccatcgctaagaccatcagactggaaagcgaagtgaccgccatcaacaacgccctgaagaagacaaacgaggccgtcagcacactcggcaatggcgttagagtgctggccacagccgtgcgcgagctgaaggacttcgtgtccaagaacctgacacgggccattaacaagaacaagtgcgacatccctgacctgaagatggccgtgtcctttagccagttcaaccggcggtttctgaacgtcgtgcggcagtttagcgacaacgccggaatcacaccagccatcagcctggacctgatgacagatgctgagctggctagagccgtgcctaacatgcctacatctgccggccagatcaagctgatgctcgagaatagagccatggtccgacggaaaggcttcggcattctgattggcgtgtacggcagcagcgtgatctatatggtgcagctgcctatcttcggcgtgatcgacacaccctgctggattgtgaaggccgctcctagctgtagcgagaagaagggcaattacgcctgcctgctgagagaggaccaaggctggtattgtcagaacgccggcagcaccgtgtactaccctaacgagaaggactgcgagacaagaggcgaccacgtgttctgtgataccgccgctggaatcaatgtggccgagcagagcaaagagtgcaacatcaacatcagcaccaccaactatccctgcaaggtgtccaccggcaggcaccctatttctatggtggctctgtctcctctgggagccctggtggcttgttataagggcgtgtcctgtagcatcggcagcaacagagtgggcatcatcaagcagctgaacaagggctgcagctacatcaccaaccaggacgccgataccgtgaccatcgacaacaccgtgtatcagctgagcaaggtggaaggcgaacagcacgtgatcaagggcagacctgtgtccagcagcttcgaccctatcaagttccctgaggatcagttccaggtggccctggaccaggtgttcgagaacatcgagaattcccaggctctggtggaccagtccaacagaatcctgtctagcgccgagaagggaaacaccggcttcatcatcgtgatcatcctgatcgccgtgctgggcagctccatgatcctggtgtccatcttcatcattatcaagaagaccaagaagcccaccggcgctcctccagaactgagcggagtgaccaacaatggcttcatccctcacaac

SEQ ID NO: 121 - DNA, 1617 bp, synthetic construct
  misc_feature 1..1617: note = Synthetic Polynucleotide
  source 1..1617: mol_type = other DNA
atgagctggaaggtggtcatcatcttcagcctgctgatcacacctcagcacggcctgaaagagagctacctggaagagtcctgcagcaccatcacagagggctacctgtctgtgctgagaaccggctggtacaccaacgtgttcacactggaagtgggcgacgtcgagaatctgacatgctctgatggccctagcctgatcaagaccgagctggatctgaccaagagcgccctgagagaactcaagaccgtgtctgccgatcagctggccagagaggaacagatcgagaatcctggcagcggcagctttgtgctgggagccattgctcttggagtggctgctgctgcagctgttacagcaggcgtggccatcgctaagaccatcagactggaaagcgaagtgaccgccatcaacaacgccctgaagaagacaaacgaggccgtcagcacactcggcaatggcgttagagtgctggccacagccgtgcgcgagctgaaggacttcgtgtccaagaacctgacacgggccattaacaagaacaagtgccctatcgacgacctgaagatggccgtgtcctttagccagttcaaccggcggtttctgaacgtcgtgcggcagtttagcgacaacgccggaatcacaccagccatcagcctggacctgatgacagatgctgagctggctagagccgtgcctaacatgcctacatctgccggccagatcaagctgatgctcgagaatagagccatggtccgacggaaaggcttcggcattctgattggcgtgtacggcagcagcgtgatctatatggtgcagctgcctatcttcggcgtgatcgacacaccctgctggattgtgaaggccgctcctagctgtagcgagaagaagggcaattacgcctgcctgctgagagaggaccaaggctggtattgtcagaacgccggcagcaccgtgtactaccctaacgagaaggactgcgagacaagaggcgaccacgtgttctgtgataccgccgctggaatcaatgtggccgagcagagcaaagagtgcaacatcaacatcagcaccaccaactatccctgcaaggtgtccaccggcaggcaccctatttctatggtggctctgtctcctctgggagccctggtggcttgttataagggcgtgtcctgtagcatcggcagcaacagagtgggcatcatcaagcagctgaacaagggctgcagctacatcaccaaccaggacgccgataccgtgaccatcgacaacaccgtgtatcagctgagcaaggtggaaggcgaacagcacgtgatcaagggcagacctgtgtccagcagcttcgaccctatcaagttccctgaggatcagttccaggtggccctggaccaggtgttcgagaacatcgagaattcccaggctctggtggaccagtccaacagaatcctgtctagcgccgagaagggaaacaccggcttcatcatcgtgatcatcctgatcgccgtgctgggcagctccatgatcctggtgtccatcttcatcattatcaagaagaccaagaagcccaccggcgctcctccagaactgagcggagtgaccaacaatggcttcatccctcacaac

SEQ ID NO: 122 - DNA, 1617 bp, synthetic construct
  misc_feature 1..1617: note = Synthetic Polynucleotide
  source 1..1617: mol_type = other DNA
atgagctggaaggtggtcatcatcttcagcctgctgatcacacctcagcacggcctgaaagagagctacctggaagagtcctgcagcaccatcacagagggctacctgtctgtgctgagaaccggctggtacaccaacgtgttcacactggaagtgggcgacgtcgagaatctgacatgctctgatggccctagcctgatcaagaccgagctggatctgaccaagagcgccctgagagaactcaagaccgtgtctgccgatcagctggccagagaggaacagatcgagaatcctggcagcggcagctttgtgctgggagccattgctcttggagtggctgctgctgcagctgttacagcaggcgtggccatcgctaagaccatcagactgcctagcgaagtgaccgccatcaacaacgccctgaagaagacaaacgaggccgtcagcacactcggcaatggcgttagagtgctggccacagccgtgcgcgagctgaaggacttcgtgtccaagaacctgacacgggccattaacaagaacaagtgcgacatcgacgacctgaagatggccgtgtcctttagccagttcaaccggcggtttctgaacgtcgtgcggcagtttagcgacaacgccggaatcacaccagccatcagcctggacctgatgacagatgctgagctggctagagccgtgcctaacatgcctacatctgccggccagatcaagctgatgctcgagaatagagccatggtccgacggaaaggcttcggcattctgattggcgtgtacggcagcagcgtgatctatatggtgcagctgcctatcttcggcgtgatcgacacaccctgctggattgtgaaggccgctcctagctgtagcgagaagaagggcaattacgcctgcctgctgagagaggaccaaggctggtattgtcagaacgccggcagcaccgtgtactaccctaacgagaaggactgcgagacaagaggcgaccacgtgttctgtgataccgccgctggaatcaatgtggccgagcagagcaaagagtgcaacatcaacatcagcaccaccaactatccctgcaaggtgtccaccggcaggcaccctatttctatggtggctctgtctcctctgggagccctggtggcttgttataagggcgtgtcctgtagcatcggcagcaacagagtgggcatcatcaagcagctgaacaagggctgcagctacatcaccaaccaggacgccgataccgtgaccatcgacaacaccgtgtatcagctgagcaaggtggaaggcgaacagcacgtgatcaagggcagacctgtgtccagcagcttcgaccctatcaagttccctgaggatcagttccaggtggccctggaccaggtgttcgagaacatcgagaattcccaggctctggtggaccagtccaacagaatcctgtctagcgccgagaagggaaacaccggcttcatcatcgtgatcatcctgatcgccgtgctgggcagctccatgatcctggtgtccatcttcatcattatcaagaagaccaagaagcccaccggcgctcctccagaactgagcggagtgaccaacaatggcttcatccctcacaac

SEQ ID NO: 123 - DNA, 1617 bp, synthetic construct
  misc_feature 1..1617: note = Synthetic Polynucleotide
  source 1..1617: mol_type = other DNA
atgagctggaaggtggtcatcatcttcagcctgctgatcacacctcagcacggcctgaaagagagctacctggaagagtcctgcagcaccatcacagagggctacctgtctgtgctgagaaccggctggtacaccaacgtgttcacactggaagtgggcgacgtcgagaatctgacatgctctgatggccctagcctgatcaagaccgagctggatctgaccaagagcgccctgagagaactcaagaccgtgtctgccgatcagctggccagagaggaacagatcgagaatcctggcagcggcagctttgtgctgggagccattgctcttggagtggctgctgctgcagctgttacagcaggcgtggccatcgctaagaccatcagactggaaagcgaagtgaccgccatcaacaacgccctgaagaagacaaacgaggccgtcagcacactcggcaatggcgttagagtgctggccacagccgtgcgcgagctgaaggacttcgtgtccaagaacctgacacgggccattaacaagaacaagtgcgacatcgacgacctgaagatggccgtgtcctttagccagttcaaccggcggtttctgaacgtcgtgcggcagtttagcgacaacgccggaatcacaccagccatcagcctggacctgatgacagatgctgagctggctagagccgtgcctaacatgcctacatctgccggccagatcaagctgatgctcgagaatagagccatggtccgacggaaaggcttcggcattctgattggcgtgtacggcagcagcgtgatctatatggtgcagctgcctatcttcggcgtgatcgacacaccctgctggattgtgaaggccgctcctagctgtagcgagaagaagggcaattacgcctgcctgctgagagaggaccaaggctggtattgtcagaacgccggcagcaccgtgtactaccctaacgagaaggactgcgagacaagaggcgaccacgtgttctgtgataccgccgctggaatcaatgtggccgagcagagcaaagagtgcaacatcaacatcagcaccaccaactatccctgcaaggtgtccaccggcaggcaccctatttctatggtggctctgtctcctctgggagccctggtggcttgttataagggcgtgtcctgtagcatcggcagcaacagagtgggcatcatcaagcagctgaacaagggctgcagctacatcaccaaccaggacgccgataccgtgaccatcgacaacaccgtgtatcagctgagcaaggtggaaggcgaacagcacgtgatcaagggcagacctgtgtccagcagcttcccacctatcaagttccctgaggatcagttccaggtggccctggaccaggtgttcgagaacatcgagaattcccaggctctggtggaccagtccaacagaatcctgtctagcgccgagaagggaaacaccggcttcatcatcgtgatcatcctgatcgccgtgctgggcagctccatgatcctggtgtccatcttcatcattatcaagaagaccaagaagcccaccggcgctcctccagaactgagcggagtgaccaacaatggcttcatccctcacaac

SEQ ID NO: 124 - DNA, 1617 bp, synthetic construct
  misc_feature 1..1617: note = Synthetic Polynucleotide
  source 1..1617: mol_type = other DNA
atgagctggaaggtggtcatcatcttcagcctgctgatcacacctcagcacggcctgaaagagagctacctggaagagtcctgcagcaccatcacagagggctacctgtctgtgctgagaaccggctggtacaccaacgtgttcacactggaagtgggcgacgtcgagaatctgacatgctctgatggccctagcctgatcaagaccgagctggatctgaccaagagcgccctgagagaactcaagaccgtgtctgccgatcagctggccagagaggaacagatcgagaatcctggcagcggcagctttgtgctgggagccattgctcttggagtggctgctgctgcagctgttacagcaggcgtggccatcgctaagaccatcagactggaaagcgaagtgaccgccatcaacaacgccctgaagaagacaaacgaggccgtcagcacactcggcaatggcgttagagtgctggccacagccgtgcgcgagctgaaggacttcgtgtccaagaacctgacacgggccattaacaagaacaagtgcgacatcgacgacctgaagatggccgtgtcctttagccagttcaaccggcggtttctgaacgtcgtgcggcagtttagcgacaacgccggaatcacaccagccatcagcctggacctgatgacagatgctgagctggctagagccgtgcctaacatgcctacatctgccggccagatcaagctgatgctcgagaatagagccatggtccgacggaaaggcttcggcattctgattggcgtgtacggcagcagcgtgatctatatggtgcagctgcctatcttcggcgtgatcgacacaccctgctggattgtgaaggccgctcctagctgtagcgagaagaagggcaattacgcctgcctgctgagagaggaccaaggctggtattgtcagaacgccggcagcaccgtgtactaccctaacgagaaggactgcgagacaagaggcgaccacgtgttctgtgataccgccgctggaatcaatgtggccgagcagagcaaagagtgcaacatcaacatcagcaccaccaactatccctgcaaggtgtccaccggcaggcaccctatttctatggtggctctgtctcctctgggagccctggtggcttgttataagggcgtgtcctgtagcatcggcagcaacagagtgggcatcatcaagcagctgaacaagggctgcagctacatcaccaaccaggacgccgataccgtgaccatcgacaacaccgtgtatcagctgagcaaggtggaaggcgaacagcacgtgatcaagggcagacctgtgtccagcagcttcgaccctatcaagttccctgagaaccagttccaggtggccctggaccaggtgttcgagaacatcgagaattcccaggctctggtggaccagtccaacagaatcctgtctagcgccgagaagggaaacaccggcttcatcatcgtgatcatcctgatcgccgtgctgggcagctccatgatcctggtgtccatcttcatcattatcaagaagaccaagaagcccaccggcgctcctccagaactgagcggagtgaccaacaatggcttcatccctcacaac

SEQ ID NO: 125 - DNA, 1617 bp, synthetic construct
  misc_feature 1..1617: note = Synthetic Polynucleotide
  source 1..1617: mol_type = other DNA
atgagctggaaggtggtcatcatcttcagcctgctgatcacacctcagcacggcctgaaagagagctacctggaagagtcctgcagcaccatcacagagggctacctgtctgtgctgagaaccggctggtacaccaacgtgttcacactggaagtgggcgacgtcgagaatctgacatgctctgatggccctagcctgatcaagaccgagctggatctgaccaagagcgccctgagagaactcaagaccgtgtctgccgatcagctggccagagaggaacagatcgagaatcctggcagcggcagctttgtgctgggagccattgctcttggagtggctgctgctgcagctgttacagcaggcgtggccatcgctaagaccatcagactggaaagcgaagtgaccgccatcaacaacgccctgaagaagacaaacgaggccgtcagcacactcggcaatggcgttagagtgctggccacagccgtgcgcgagctgaaggacttcgtgtccaagaacctgacacgggccattaacaagaacaagtgcgacatcgacgacctgaagatggccgtgtcctttagccagttcaaccggcggtttctgaacgtcgtgcggcagtttagcgacaacgccggaatcacaccagccatcagcctggacctgatgacagatgctgagctggctagagccgtgcctaacatgcctacatctgccggccagatcaagctgatgctcgagaatagagccatggtccgacggaaaggcttcggcattctgattggcgtgtacggcagcagcgtgatctatatggtgcagctgcctatcttcggcgtgatcgacacaccctgctggattgtgaaggccgctcctagctgtagcgagaagaagggcaattacgcctgcctgctgagagaggaccaaggctggtattgtcagaacgccggcagcaccgtgtactaccctaacgagaaggactgcgagacaagaggcgaccacgtgttctgtgataccgccgctggaatcaatgtggccgagcagagcaaagagtgcaacatcaacatcagcaccaccaactatccctgcaaggtgtccaccggcaggcaccctatttctatggtggctctgtctcctctgggagccctggtggcttgttataagggcgtgtcctgtagcatcggcagcaacagagtgggcatcatcaagcagctgaacaagggctgcagctacatcaccaaccaggacgccgataccgtgaccatcgacaacaccgtgtatcagctgagcaaggtggaaggcgaacagcacgtgatcaagggcagacctgtgtccagcagcttcgaccctatcaagttccctcaggatcagttccaggtggccctggaccaggtgttcgagaacatcgagaattcccaggctctggtggaccagtccaacagaatcctgtctagcgccgagaagggaaacaccggcttcatcatcgtgatcatcctgatcgccgtgctgggcagctccatgatcctggtgtccatcttcatcattatcaagaagaccaagaagcccaccggcgctcctccagaactgagcggagtgaccaacaatggcttcatccctcacaac

SEQ ID NO: 126 - DNA, 1617 bp, synthetic construct
  misc_feature 1..1617: note = Synthetic Polynucleotide
  source 1..1617: mol_type = other DNA
atgagctggaaggtggtcatcatcttcagcctgctgatcacacctcagcacggcctgaaagagagctacctggaagagtcctgcagcaccatcacagagggctacctgtctgtgctgagaaccggctggtacaccaacgtgttcacactggaagtgggcgacgtcgagaatctgacatgctctgatggccctagcctgatcaagaccgagctggatctgaccaagagcgccctgagagaactcaagaccgtgtctgccgatcagctggccagagaggaacagatcgagaatcctggcagcggcagctttgtgctgggagccattgctcttggagtggctgctgctgcagctgttacagcaggcgtggccatcgctaagaccatcagactggaaagcgaagtgaccgccatcaacaacgccctgaagaagacaaacgaggccgtcagcacactcggcaatggcgttagagtgctggccacagccgtgcgcgagctgaaggacttcgtgtccaagaacctgacacgggccattaacaagaacaagtgcgacatcgacgacctgaagatggccgtgtcctttagccagtggaaccggcggtttctgaacgtcgtgcggcagtttagcgacaacgccggaatcacaccagccatcagcctggacctgatgacagatgctgagctggctagagccgtgcctaacatgcctacatctgccggccagatcaagctgatgctcgagaatagagccatggtccgacggaaaggcttcggcattctgattggcgtgtacggcagcagcgtgatctatatggtgcagctgcctatcttcggcgtgatcgacacaccctgctggattgtgaaggccgctcctagctgtagcgagaagaagggcaattacgcctgcctgctgagagaggaccaaggctggtattgtcagaacgccggcagcaccgtgtactaccctaacgagaaggactgcgagacaagaggcgaccacgtgttctgtgataccgccgctggaatcaatgtggccgagcagagcaaagagtgcaacatcaacatcagcaccaccaactatccctgcaaggtgtccaccggcaggcaccctatttctatggtggctctgtctcctctgggagccctggtggcttgttataagggcgtgtcctgtagcatcggcagcaacagagtgggcatcatcaagcagctgaacaagggctgcagctacatcaccaaccaggacgccgataccgtgaccatcgacaacaccgtgtatcagctgagcaaggtggaaggcgaacagcacgtgatcaagggcagacctgtgtccagcagcttcgaccctatcaagttccctgaggatcagttccaggtggccctggaccaggtgttcgagaacatcgagaattcccaggctctggtggaccagtccaacagaatcctgtctagcgccgagaagggaaacaccggcttcatcatcgtgatcatcctgatcgccgtgctgggcagctccatgatcctggtgtccatcttcatcattatcaagaagaccaagaagcccaccggcgctcctccagaactgagcggagtgaccaacaatggcttcatccctcacaac

SEQ ID NO: 127 - RNA, 1617 nt, synthetic construct
  misc_feature 1..1617: note = Synthetic Polynucleotide
  source 1..1617: mol_type = other RNA
atgagctggaaggtggtcatcatcttcagcctgctgatcacacctcagcacggcctgaaagagagctacctggaagagtcctgcagcaccatcacagagggctacctgtctgtgctgagaaccggctggtacaccaacgtgttcacactggaagtgggcgacgtcgagaatctgacatgctctgatggccctagcctgatcaagaccgagctggatctgaccaagagcgccctgagagaactcaagaccgtgtctgccgatcagctggccagagaggaacagatcgagaatcctggcagcggcagctttgtgctgggagccattgctcttggagtggctgctgctgcagctgttacagcaggcgtggccatctgcaagaccatcagactggaaagcgaagtgaccgccatcaacaacgccctgaagaagacaaacgaggccgtcagcacactcggcaatggcgttagagtgctggcctttgccgtgcgcgagctgaaggacttcgtgtccaagaacctgacacgggccctgaacaagaacaagtgcgacatcgacgacctgaagatggccgtgtcctttagccagttcaaccggcggtttctgaacgtcgtgcggcagtttagcgacaacgccggaatcacaccagccatcagcctggacctgatgacagatgctgagctggctagagccgtgcctaacatgcctacatctgccggccagatcaagctgatgctcgagaatagagccatggtccgacggaaaggcttcggcattctgtgtggcgtgtacggcagcagcgtgatctatatggtgcagctgcctatcttcggcgtgatcgacacaccctgctggattgtgaaggccgctcctagctgtagcgagaagaagggcaattacgcctgcctgctgagagaggaccaaggctggtattgtcagaacgccggcagcaccgtgtactaccctaacgagaaggactgcgagacaagaggcgaccacgtgttctgtgataccgccgctggaatcaatgtggccgagcagagcaaagagtgcaacatcaacatcagcaccaccaactatccctgcaaggtgtccaccggcaggcaccctatttctatggtggctctgtctcctctgggagccctggtggcttgttataagggcgtgtcctgtagcatcggcagcaacagagtgggcatcatcaagcagctgaacaagggctgcagctacatcaccaaccaggacgccgataccgtgaccatcgacaacaccgtgtatcagctgagcaaggtggaaggcgaacagcacgtgatcaagggcagacctgtgtccagcagcttcgaccctatcaagttccctgaggatcagttcaacgtggccctggaccaggtgttcgagaacatcgagaattcccaggctctggtggaccagtccaacagaatcctgtctagcgccgagaagggaaacaccggcttcatcatcgtgatcatcctgatcgccgtgctgggcagctccatgatcctggtgtccatcttcatcattatcaagaagaccaagaagcccaccggcgctcctccagaactgagcggagtgaccaacaatggcttcatccctcacaac

SEQ ID NO: 128 - RNA, 1617 nt, synthetic construct
  misc_feature 1..1617: note = Synthetic Polynucleotide
  source 1..1617: mol_type = other RNA
atgagctggaaggtggtcatcatcttcagcctgctgatcacacctcagcacggcctgaaagagagctacctggaagagtcctgcagcaccatcacagagggctacctgtctgtgctgagaaccggctggtacaccaacgtgttcacactggaagtgggcgacgtcgagaatctgacatgctctgatggccctagcctgatcaagaccgagctggatctgaccaagagcgccctgagagaactcaagaccgtgtctgccgatcagctggccagagaggaacagatcgagaatcctggcagcggcagctttgtgctgggagccattgctcttggagtggctgctgctgcagctgttacagcaggcgtggccatctgcaagaccatcagactggaaagcgaagtgaccgccatcaacaacgccctgaagaagacaaacgaggccgtcagcacactcggcaatggcgttagagtgctggccacagccgtgcgcgagctgaaggacttcgtgtccaagaacctgacacgggccattaacaagaacaagtgcgacatcgacgacctgaagatggccgtgtcctttagccagttcaaccggcggtttctgaacgtcgtgcggcagtttagcgacaacgccggaatcacaccagccatcagcctggacctgatgacagatgctgagctggctagagccgtgcctaacatgcctacatctgccggccagatcaagctgatgctcgagaatagagccatggtccgacggaaaggcttcggcattctgtgtggcgtgtacggcagcagcgtgatctatatggtgcagctgcctatcttcggcgtgatcgacacaccctgctggattgtgaaggccgctcctagctgtagcgagaagaagggcaattacgcctgcctgctgagagaggaccaaggctggtattgtcagaacgccggcagcaccgtgtactaccctaacgagaaggactgcgagacaagaggcgaccacgtgttctgtgataccgccgctggaatcaatgtggccgagcagagcaaagagtgcaacatcaacatcagcaccaccaactatccctgcaaggtgtccaccggcaggcaccctatttctatggtggctctgtctcctctgggagccctggtggcttgttataagggcgtgtcctgtagcatcggcagcaacagagtgggcatcatcaagcagctgaacaagggctgcagctacatcaccaaccaggacgccgataccgtgaccatcgacaacaccgtgtatcagctgagcaaggtggaaggcgaacagcacgtgatcaagggcagacctgtgtccagcagcttcgaccctatcaagttccctgagcaccagtggcatgtggccctggaccaggtgttcgagaacatcgagaattcccaggctctggtggaccagtccaacagaatcctgtctagcgccgagaagggaaacaccggcttcatcatcgtgatcatcctgatcgccgtgctgggcagctccatgatcctggtgtccatcttcatcattatcaagaagaccaagaagcccaccggcgctcctccagaactgagcggagtgaccaacaatggcttcatccctcacaac

SEQ ID NO: 129 - RNA, 1617 nt, synthetic construct
  misc_feature 1..1617: note = Synthetic Polynucleotide
  source 1..1617: mol_type = other RNA
atgagctggaaggtggtcatcatcttcagcctgctgatcacacctcagcacggcctgaaagagagctacctggaagagtcctgcagcaccatcacagagggctacctgtctgtgctgagaaccggctggtacaccaacgtgttcacactggaagtgggcgacgtcgagaatctgacatgctctgatggccctagcctgatcaagaccgagctggatctgctcaagagcgccctgagagaactcaagaccgtgtctgccgatcagctggccagagaggaacagatcgagaatcctggcagcggcagctttgtgctgggagccattgctcttggagtggctgctgctgcagctgttacagcaggcgtggccatcgctaagaccatcagactggaaagcgaagtgaccgccatcaacaacgccctgaagaagacaaacgaggccgtcagcacactcggcaatggcgttagagtgctggccacagccgtgcgcgagctgaaggacttcgtgtccaagaacctgacacgggccattaacaagaacaagtgcgacatccctgacctgaagatggccgtgtcctttagccagttcaaccggcggtttctgaacgtcgtgcggcagtttagcgacaacgccggaatcacaccagccatcagcctggacctgatgacagatgctgagctggctagagccgtgcctaacatgcctacatctgccggccagatcaagctgatgctcgagaatagagccatggtccgacggaaaggcttcggcattctgattggcgtgtacggcagcagcgtgatctatatggtgcagctgcctatcttcggcgtgatcgacacaccctgctggattgtgaaggccgctcctagctgtagcgagaagaagggcaattacgcctgcctgctgagagaggaccaaggctggtattgtcagaacgccggcagcaccgtgtactaccctaacgagaaggactgcgagacaagaggcgaccacgtgttctgtgataccgccgctggaatcaatgtggccgagcagagcaaagagtgcaacatcaacatcagcaccaccaactatccctgcaaggtgtccaccggcaggcaccctatttctatggtggctctgtctcctctgggagccctggtggcttgttataagggcgtgtcctgtagcatcggcagcaacagagtgggcatcatcaagcagctgaacaagggctgcagctacatcaccaaccaggacgccgataccgtgaccatcgacaacaccgtgtatcagctgagcaaggtggaaggcgaacagcacgtgatcaagggcagacctgtgtccagcagcttcgaccctatcaagttccctgaggatcagttccaggtggccctggaccaggtgttcgagaacatcgagaattcccaggctctggtggaccagtccaacagaatcctgtctagcgccgagaagggaaacaccggcttcatcatcgtgatcatcctgatcgccgtgctgggcagctccatgatcctggtgtccatcttcatcattatcaagaagaccaagaagcccaccggcgctcctccagaactgagcggagtgaccaacaatggcttcatccctcacaac

SEQ ID NO: 130 - RNA, 1617 nt, synthetic construct
  misc_feature 1..1617: note = Synthetic Polynucleotide
  source 1..1617: mol_type = other RNA
atgagctggaaggtggtcatcatcttcagcctgctgatcacacctcagcacggcctgaaagagagctacctggaagagtcctgcagcaccatcacagagggctacctgtctgtgctgagaaccggctggtacaccaacgtgttcacactggaagtgggcgacgtcgagaatctgacatgctctgatggccctagcctgatcaagaccgagctggatctgctcaagagcgccctgagagaactcaagaccgtgtctgccgatcagctggccagagaggaacagatcgagaatcctggcagcggcagctttgtgctgggagccattgctcttggagtggctgctgctgcagctgttacagcaggcgtggccatcgctaagaccatcagactggaaagcgaagtgaccgccatcaacaacgccctgaagaagacaaacgaggccgtcagcacactcggcaatggcgttagagtgctggccacagccgtgcgcgagctgaaggacttcgtgtccaagaacctgacacgggccattaacaagaacaagtgcgacatccctgacctgaagatggccgtgtcctttagccagttcaaccggcggtttctgaacgtcgtgcggcagtttagcgacaacgccggaatcacaccagccatcagcctggacctgatgacagatgctgagctggctagagccgtgcctaacatgcctacatctgccggccagatcaagctgatgctcgagaatagagccatggtccgacggaaaggcttcggcattctgattggcgtgtacggcagcagcgtgatctatatggtgcagctgcctatcttcggcgtgatcgacacaccctgctggattgtgaaggccgctcctagctgtagcgagaagaagggcaattacgcctgcctgctgagagaggaccaaggctggtattgtcagaacgccggcagcaccgtgtactaccctaacgagaaggactgcgagacaagaggcgaccacgtgttctgtgataccgccgctggaatcaatgtggccgagcagagcaaagagtgcaacatcaacatcagcaccaccaactatccctgcaaggtgtccaccggcaggcaccctatttctatggtggctctgtctcctctgggagccctggtggcttgttataagggcgtgtcctgtagcatcggcagcaacagagtgggcatcatcaagcagctgaacaagggctgcagctacatcaccaaccaggacgccgataccgtgaccatcgacaacaccgtgtatcagctgagcaaggtggaaggcgaacagcacgtgatcaagggcagacctgtgtccagcagcttcgaccctatcaagttccctgagaaccagttccaggtggccctggaccaggtgttcgagaacatcgagaattcccaggctctggtggaccagtccaacagaatcctgtctagcgccgagaagggaaacaccggcttcatcatcgtgatcatcctgatcgccgtgctgggcagctccatgatcctggtgtccatcttcatcattatcaagaagaccaagaagcccaccggcgctcctccagaactgagcggagtgaccaacaatggcttcatccctcacaac

SEQ ID NO: 131 - RNA, 1617 nt, synthetic construct
  misc_feature 1..1617: note = Synthetic Polynucleotide
  source 1..1617: mol_type = other RNA
atgagctggaaggtggtcatcatcttcagcctgctgatcacacctcagcacggcctgaaagagagctacctggaagagtcctgcagcaccatcacagagggctacctgtctgtgctgagaaccggctggtacaccaacgtgttcacactggaagtgggcgacgtcgagaatctgacatgctctgatggccctagcctgatcaagaccgagctggatctgctcaagagcgccctgagagaactcaagaccgtgtctgccgatcagctggccagagaggaacagatcgagaatcctggcagcggcagctttgtgctgggagccattgctcttggagtggctgctgctgcagctgttacagcaggcgtggccatcgctaagaccatcagactggaaagcgaagtgaccgccatcaacaacgccctgaagaagacaaacgaggccgtcagcacactcggcaatggcgttagagtgctggccacagccgtgcgcgagctgaaggacttcgtgcttaagaacctgacacgggccattaacaagaacaagtgcgacatccctgacctgaagatggccgtgtcctttagccagttcaaccggcggtttctgaacgtcgtgcggcagtttagcgacaacgccggaatcacaccagccatcagcctggacctgatgacagatgctgagctggctagagccgtgcctaacatgcctacatctgccggccagatcaagctgatgctcgagaatagagccatggtccgacggaaaggcttcggcattctgattggcgtgtacggcagcagcgtgatctatatggtgcagctgcctatcttcggcgtgatcgacacaccctgctggattgtgaaggccgctcctagctgtagcgagaagaagggcaattacgcctgcctgctgagagaggaccaaggctggtattgtcagaacgccggcagcaccgtgtactaccctaacgagaaggactgcgagacaagaggcgaccacgtgttctgtgataccgccgctggaatcaatgtggccgagcagagcaaagagtgcaacatcaacatcagcaccaccaactatccctgcaaggtgtccaccggcaggcaccctatttctatggtggctctgtctcctctgggagccctggtggcttgttataagggcgtgtcctgtagcatcggcagcaacagagtgggcatcatcaagcagctgaacaagggctgcagctacatcaccaaccaggacgccgataccgtgaccatcgacaacaccgtgtatcagctgagcaaggtggaaggcgaacagcacgtgatcaagggcagacctgtgtccagcagcttcgaccctatcaagttccctgaggatcagttccaggtggccctggaccaggtgttcgagaacatcgagaattcccaggctctggtggaccagtccaacagaatcctgtctagcgccgagaagggaaacaccggcttcatcatcgtgatcatcctgatcgccgtgctgggcagctccatgatcctggtgtccatcttcatcattatcaagaagaccaagaagcccaccggcgctcctccagaactgagcggagtgaccaacaatggcttcatccctcacaac

SEQ ID NO: 132 - RNA, 1617 nt, synthetic construct
  misc_feature 1..1617: note = Synthetic Polynucleotide
  source 1..1617: mol_type = other RNA
atgagctggaaggtggtcatcatcttcagcctgctgatcacacctcagcacggcctgaaagagagctacctggaagagtcctgcagcaccatcacagagggctacctgtctgtgctgagaaccggctggtacaccaacgtgttcacactggaagtgggcgacgtcgagaatctgacatgctctgatggccctagcctgatcaagaccgagctggatctgctcaagagcgccctgagagaactcaagaccgtgtctgccgatcagctggccagagaggaacagatcgagaatcctggcagcggcagctttgtgctgggagccattgctcttggagtggctgctgctgcagctgttacagcaggcgtggccatcgctaagaccatcagactggaaagcgaagtgaccgccatcaacaacgccctgaagaagacaaacgaggccgtcagcacactcggcaatggcgttagagtgctggccacagccgtgcgcgagctgaaggacttcgtgcttaagaacctgacacgggccattaacaagaacaagtgcgacatccctgacctgaagatggccgtgtcctttagccagttcaaccggcggtttctgaacgtcgtgcggcagtttagcgacaacgccggaatcacaccagccatcagcctggacctgatgacagatgctgagctggctagagccgtgcctaacatgcctacatctgccggccagatcaagctgatgctcgagaatagagccatggtccgacggaaaggcttcggcattctgattggcgtgtacggcagcagcgtgatctatatggtgcagctgcctatcttcggcgtgatcgacacaccctgctggattgtgaaggccgctcctagctgtagcgagaagaagggcaattacgcctgcctgctgagagaggaccaaggctggtattgtcagaacgccggcagcaccgtgtactaccctaacgagaaggactgcgagacaagaggcgaccacgtgttctgtgataccgccgctggaatcaatgtggccgagcagagcaaagagtgcaacatcaacatcagcaccaccaactatccctgcaaggtgtccaccggcaggcaccctatttctatggtggctctgtctcctctgggagccctggtggcttgttataagggcgtgtcctgtagcatcggcagcaacagagtgggcatcatcaagcagctgaacaagggctgcagctacatcaccaaccaggacgccgataccgtgaccatcgacaacaccgtgtatcagctgagcaaggtggaaggcgaacagcacgtgatcaagggcagacctgtgtccagcagcttcgaccctatcaagttccctgagaaccagttccaggtggccctggaccaggtgttcgagaacatcgagaattcccaggctctggtggaccagtccaacagaatcctgtctagcgccgagaagggaaacaccggcttcatcatcgtgatcatcctgatcgccgtgctgggcagctccatgatcctggtgtccatcttcatcattatcaagaagaccaagaagcccaccggcgctcctccagaactgagcggagtgaccaacaatggcttcatccctcacaac

SEQ ID NO: 133 - RNA, 1617 nt, synthetic construct
  misc_feature 1..1617: note = Synthetic Polynucleotide
  source 1..1617: mol_type = other RNA
atgagctggaaggtggtcatcatcttcagcctgctgatcacacctcagcacggcctgaaagagagctacctggaagagtcctgcagcaccatcacagagggctacctgtctgtgctgagaaccggctggtacaccaacgtgttcacactgcctgtgggcgacgtcgagaatctgacatgctctgatggccctagcctgatcaagaccgagctggatctgctcaagagcgccctgagagaactcaagaccgtgtctgccgatcagctggccagagaggaacagatcgagaatcctggcagcggcagctttgtgctgggagccattgctcttggagtggctgctgctgcagctgttacagcaggcgtggccatcgctaagaccatcagactggaaagcgaagtgaccgccatcaacaacgccctgaagaagacaaacgaggccgtcagcacactcggcaatggcgttagagtgctggccacagccgtgcgcgagctgaaggacttcgtgtccaagaacctgacacgggccattaacaagaacaagtgcgacatcgacgacctgaagatggccgtgtcctttagccagttcaaccggcggtttctgaacgtcgtgcggcagtttagcgacaacgccggaatcacaccagccatcagcctggacctgatgacagatgctgagctggctagagccgtgcctaacatgcctacatctgccggccagatcaagctgatgctcgagaatagagccatggtccgacggaaaggcttcggcattctgattggcgtgtacggcagcagcgtgatctatatggtgcagctgcctatcttcggcgtgatcgacacaccctgctggattgtgaaggccgctcctagctgtagcgagaagaagggcaattacgcctgcctgctgagagaggaccaaggctggtattgtcagaacgccggcagcaccgtgtactaccctaacgagaaggactgcgagacaagaggcgaccacgtgttctgtgataccgccgctggaatcaatgtggccgagcagagcaaagagtgcaacatcaacatcagcaccaccaactatccctgcaaggtgtccaccggcaggcaccctatttctatggtggctctgtctcctctgggagccctggtggcttgttataagggcgtgtcctgtagcatcggcagcaacagagtgggcatcatcaagcagctgaacaagggctgcagctacatcaccaaccaggacgccgataccgtgaccatcgacaacaccgtgtatcagctgagcaaggtggaaggcgaacagcacgtgatcaagggcagacctgtgtccagcagcttcgaccctatcaagttccctgaggatcagttccaggtggccctggaccaggtgttcgagaacatcgagaattcccaggctctggtggaccagtccaacagaatcctgtctagcgccgagaagggaaacaccggcttcatcatcgtgatcatcctgatcgccgtgctgggcagctccatgatcctggtgtccatcttcatcattatcaagaagaccaagaagcccaccggcgctcctccagaactgagcggagtgaccaacaatggcttcatccctcacaac

SEQ ID NO: 134 - RNA, 1617 nt, synthetic construct
  misc_feature 1..1617: note = Synthetic Polynucleotide
  source 1..1617: mol_type = other RNA
atgagctggaaggtggtcatcatcttcagcctgctgatcacacctcagcacggcctgaaagagagctacctggaagagtcctgcagcaccatcacagagggctacctgtctgtgctgagaaccggctggtacaccaacgtgttcacactgcctgtgggcgacgtcgagaatctgacatgctctgatggccctagcctgatcaagaccgagctggatctgctcaagagcgccctgagagaactcaagaccgtgtctgccgatcagctggccagagaggaacagatcgagaatcctggcagcggcagctttgtgctgggagccattgctcttggagtggctgctgctgcagctgttacagcaggcgtggccatcgctaagaccatcagactggaaagcgaagtgaccgccatcaacaacgccctgaagaagacaaacgaggccgtcagcacactcggcaatggcgttagagtgctggccacagccgtgcgcgagctgaaggacttcgtgtccaagaacctgacacgggccattaacaagaacaagtgcgacatcgacgacctgaagatggccgtgtcctttagccagttcaaccggcggtttctgaacgtcgtgcggcagtttagcgacaacgccggaatcacaccagccatcagcctggacctgatgacagatgctgagctggctagagccgtgcctaacatgcctacatctgccggccagatcaagctgatgctcgagaatagagccatggtccgacggaaaggcttcggcattctgattggcgtgtacggcagcagcgtgatctatatggtgcagctgcctatcttcggcgtgatcgacacaccctgctggattgtgaaggccgctcctagctgtagcgagaagaagggcaattacgcctgcctgctgagagaggaccaaggctggtattgtcagaacgccggcagcaccgtgtactaccctaacgagaaggactgcgagacaagaggcgaccacgtgttctgtgataccgccgctggaatcaatgtggccgagcagagcaaagagtgcaacatcaacatcagcaccaccaactatccctgcaaggtgtccaccggcaggcaccctatttctatggtggctctgtctcctctgggagccctggtggcttgttataagggcgtgtcctgtagcatcggcagcaacagagtgggcatcatcaagcagctgaacaagggctgcagctacatcaccaaccaggacgccgataccgtgaccatcgacaacaccgtgtatcagctgagcaaggtggaaggcgaacagcacgtgatcaagggcagacctgtgtccagcagcttcgaccctatcaagttccctgagaaccagttccaggtggccctggaccaggtgttcgagaacatcgagaattcccaggctctggtggaccagtccaacagaatcctgtctagcgccgagaagggaaacaccggcttcatcatcgtgatcatcctgatcgccgtgctgggcagctccatgatcctggtgtccatcttcatcattatcaagaagaccaagaagcccaccggcgctcctccagaactgagcggagtgaccaacaatggcttcatccctcacaac

SEQ ID NO: 135 - RNA, 1617 nt, synthetic construct
  misc_feature 1..1617: note = Synthetic Polynucleotide
  source 1..1617: mol_type = other RNA
atgagctggaaggtggtcatcatcttcagcctgctgatcacacctcagcacggcctgaaagagagctacctggaagagtcctgcagcaccatcacagagggctacctgtctgtgctgagaaccggctggtacaccaacgtgttcacactggaagtgggcgacgtcgagaatctgacatgctctgatggccctagcctgatcaagaccgagctggatctgctcaagagcgccctgagagaactcaagaccgtgtctgccgatcagctggccagagaggaacagatcgagaatcctggcagcggcagctttgtgctgggagccattgctcttggagtggctgctgctgcagctgttacagcaggcgtggccatcgctaagaccatcagactggaaagcgaagtgaccgccatcaacaacgccctgaagaagacaaacgaggccgtcagcacactcggcaatggcgttagagtgctggccacagccgtgcgcgagctgaaggacttcgtgtccaagaacctgacacgggccattaacaagaacaagtgcgacatcgacgacctgaagatggccgtgtcctttagccagttcaaccggcggtttctgaacgtcgtgcggcagtttagcgacaacgccggaatcacaccagccatcagcctggacctgatgacagatgctgagctggctagagccgtgcctaacatgcctacatctgccggccagatcaagctgatgctcgagaatagagccatggtccgacggaaaggcttcggcattctgattggcgtgtacggcagcagcgtgatctatatggtgcagctgcctatcttcggcgtgatcgacacaccctgctggattgtgaaggccgctcctagctgtagcgagaagaagggcaattacgcctgcctgctgagagaggaccaaggctggtattgtcagaacgccggcagcaccgtgtactaccctaacgagaaggactgcgagacaagaggcgaccacgtgttctgtgataccgccgctggaatcaatgtggccgagcagagcaaagagtgcaacatcaacatcagcaccaccaactatccctgcaaggtgtccaccggcaggcaccctatttctatggtggctctgtctcctctgggagccctggtggcttgttataagggcgtgtcctgtagcatcggcagcaacagagtgggcatcatcaagcagctgaacaagggctgcagctacatcaccaaccaggacgccgataccgtgaccatcgacaacaccgtgtatcagctgagcaaggtggaaggcgaacagcacgtgatcaagggcagacctgtgtccagcagcttcgaccctatcaagttccctgaggatcagttccaggtggccctggaccaggtgttcgagaacatcgagaattcccaggctctggtggaccagtccaacagaatcctgtctagcgccgagaagggaaacaccggcttcatcatcgtgatcatcctgatcgccgtgctgggcagctccatgatcctggtgtccatcttcatcattatcaagaagaccaagaagcccaccggcgctcctccagaactgagcggagtgaccaacaatggcttcatccctcacaac

SEQ ID NO: 136 - RNA, 1617 nt, synthetic construct
  misc_feature 1..1617: note = Synthetic Polynucleotide
  source 1..1617: mol_type = other RNA
atgagctggaaggtggtcatcatcttcagcctgctgatcacacctcagcacggcctgaaagagagctacctggaagagtcctgcagcaccatcacagagggctacctgtctgtgctgagaaccggctggtacaccaacgtgttcacactggaagtgggcgacctcgagaatctgacatgctctgatggccctagcctgatcaagaccgagctggatctgaccaagagcgccctgagagaactcaagaccgtgtctgccgatcagctggccagagaggaacagatcgagaatcctggcagcggcagctttgtgctgggagccattgctcttggagtggctgctgctgcagctgttacagcaggcgtggccatcgctaagaccatcagactggaaagcgaagtgaccgccatcaacaacgccctgaagaagacaaacgaggccgtcagcacactcggcaatggcgttagagtgctggccacagccgtgcgcgagctgaaggacttcgtgtccaagaacctgacacgggccattaacaagaacaagtgcgacatcgacgacctgaagatggccgtgtcctttagccagttcaaccggcggtttctgaacgtcgtgcggcagtttagcgacaacgccggaatcacaccagccatcagcctggacctgatgacagatgctgagctggctagagccgtgcctaacatgcctacatctgccggccagatcaagctgatgctcgagaatagagccatggtccgacggaaaggcttcggcattctgattggcgtgtacggcagcagcgtgatctatatggtgcagctgcctatcttcggcgtgatcgacacaccctgctggattgtgaaggccgctcctagctgtagcgagaagaagggcaattacgcctgcctgctgagagaggaccaaggctggtattgtcagaacgccggcagcaccgtgtactaccctaacgagaaggactgcgagacaagaggcgaccacgtgttctgtgataccgccgctggaatcaatgtggccgagcagagcaaagagtgcaacatcaacatcagcaccaccaactatccctgcaaggtgtccaccggcaggcaccctatttctatggtggctctgtctcctctgggagccctggtggcttgttataagggcgtgtcctgtagcatcggcagcaacagagtgggcatcatcaagcagctgaacaagggctgcagctacatcaccaaccaggacgccgataccgtgaccatcgacaacaccgtgtatcagctgagcaaggtggaaggcgaacagcacgtgatcaagggcagacctgtgtccagcagcttcgaccctatcaagttccctgaggatcagttccaggtggccctggaccaggtgttcgagaacatcgagaattcccaggctctggtggaccagtccaacagaatcctgtctagcgccgagaagggaaacaccggcttcatcatcgtgatcatcctgatcgccgtgctgggcagctccatgatcctggtgtccatcttcatcattatcaagaagaccaagaagcccaccggcgctcctccagaactgagcggagtgaccaacaatggcttcatccctcacaac

SEQ ID NO: 137 - RNA, 1617 nt, synthetic construct
  misc_feature 1..1617: note = Synthetic Polynucleotide
  source 1..1617: mol_type = other RNA
atgagctggaaggtggtcatcatcttcagcctgctgatcacacctcagcacggcctgaaagagagctacctggaagagtcctgcagcaccatcacagagggctacctgtctgtgctgagaaccggctggtacaccaacgtgttcacactggaagtgggcgacgtcgagaatctgacatgctctgatggccctagcctgatcaagaccgagctggatctgaccaagagcgccctgagagaactcaagaccgtgtctgccgatcagctggccagagaggaacagatcgagaatcctggcagcggcagctttgtgctgggagccattgctcttggagtggctgctgctgcagctgttacagcaggcgtggccatcgctaagaccatcagactggaaagcgaagtgaccgccatcaacaacgccctgaagaagacaaacgaggccgtcagcacactcggcaatggcgttagagtgctggccacagccgtgcgcgagctgaaggacttcgtgcttaagaacctgacacgggccattaacaagaacaagtgcgacatcgacgacctgaagatggccgtgtcctttagccagttcaaccggcggtttctgaacgtcgtgcggcagtttagcgacaacgccggaatcacaccagccatcagcctggacctgatgacagatgctgagctggctagagccgtgcctaacatgcctacatctgccggccagatcaagctgatgctcgagaatagagccatggtccgacggaaaggcttcggcattctgattggcgtgtacggcagcagcgtgatctatatggtgcagctgcctatcttcggcgtgatcgacacaccctgctggattgtgaaggccgctcctagctgtagcgagaagaagggcaattacgcctgcctgctgagagaggaccaaggctggtattgtcagaacgccggcagcaccgtgtactaccctaacgagaaggactgcgagacaagaggcgaccacgtgttctgtgataccgccgctggaatcaatgtggccgagcagagcaaagagtgcaacatcaacatcagcaccaccaactatccctgcaaggtgtccaccggcaggcaccctatttctatggtggctctgtctcctctgggagccctggtggcttgttataagggcgtgtcctgtagcatcggcagcaacagagtgggcatcatcaagcagctgaacaagggctgcagctacatcaccaaccaggacgccgataccgtgaccatcgacaacaccgtgtatcagctgagcaaggtggaaggcgaacagcacgtgatcaagggcagacctgtgtccagcagcttcgaccctatcaagttccctgaggatcagttccaggtggccctggaccaggtgttcgagaacatcgagaattcccaggctctggtggaccagtccaacagaatcctgtctagcgccgagaagggaaacaccggcttcatcatcgtgatcatcctgatcgccgtgctgggcagctccatgatcctggtgtccatcttcatcattatcaagaagaccaagaagcccaccggcgctcctccagaactgagcggagtgaccaacaatggcttcatccctcacaac

SEQ ID NO: 138 - RNA, 1617 nt, synthetic construct
  misc_feature 1..1617: note = Synthetic Polynucleotide
  source 1..1617: mol_type = other RNA
atgagctggaaggtggtcatcatcttcagcctgctgatcacacctcagcacggcctgaaagagagctacctggaagagtcctgcagcaccatcacagagggctacctgtctgtgctgagaaccggctggtacaccaacgtgttcacactggaagtgggcgacgtcgagaatctgacatgctctgatggccctagcctgatcaagaccgagctggatctgaccaagagcgccctgagagaactcaagaccgtgtctgccgatcagctggccagagaggaacagatcgagaatcctggcagcggcagctttgtgctgggagccattgctcttggagtggctgctgctgcagctgttacagcaggcgtggccatcgctaagaccatcagactggaaagcgaagtgaccgccatcaacaacgccctgaagaagacaaacgaggccgtcagcacactcggcaatggcgttagagtgctggccacagccgtgcgcgagctgaaggacttcgtgtccaagaacctgtggcgggccattaacaagaacaagtgcgacatcgacgacctgaagatggccgtgtcctttagccagttcaaccggcggtttctgaacgtcgtgcggcagtttagcgacaacgccggaatcacaccagccatcagcctggacctgatgacagatgctgagctggctagagccgtgcctaacatgcctacatctgccggccagatcaagctgatgctcgagaatagagccatggtccgacggaaaggcttcggcattctgattggcgtgtacggcagcagcgtgatctatatggtgcagctgcctatcttcggcgtgatcgacacaccctgctggattgtgaaggccgctcctagctgtagcgagaagaagggcaattacgcctgcctgctgagagaggaccaaggctggtattgtcagaacgccggcagcaccgtgtactaccctaacgagaaggactgcgagacaagaggcgaccacgtgttctgtgataccgccgctggaatcaatgtggccgagcagagcaaagagtgcaacatcaacatcagcaccaccaactatccctgcaaggtgtccaccggcaggcaccctatttctatggtggctctgtctcctctgggagccctggtggcttgttataagggcgtgtcctgtagcatcggcagcaacagagtgggcatcatcaagcagctgaacaagggctgcagctacatcaccaaccaggacgccgataccgtgaccatcgacaacaccgtgtatcagctgagcaaggtggaaggcgaacagcacgtgatcaagggcagacctgtgtccagcagcttcgaccctatcaagttccctgaggatcagttccaggtggccctggaccaggtgttcgagaacatcgagaattcccaggctctggtggaccagtccaacagaatcctgtctagcgccgagaagggaaacaccggcttcatcatcgtgatcatcctgatcgccgtgctgggcagctccatgatcctggtgtccatcttcatcattatcaagaagaccaagaagcccaccggcgctcctccagaactgagcggagtgaccaacaatggcttcatccctcacaac

SEQ ID NO: 139 - RNA, 1617 nt, synthetic construct
  misc_feature 1..1617: note = Synthetic Polynucleotide
  source 1..1617: mol_type = other RNA
atgagctggaaggtggtcatcatcttcagcctgctgatcacacctcagcacggcctgaaagagagctacctggaagagtcctgcagcaccatcacagagggctacctgtctgtgctgagaaccggctggtacaccaacgtgttcacactggaagtgggcgacctcgagaatctgacatgctctgatggccctagcctgatcaagaccgagctggatctgctcaagagcgccctgagagaactcaagaccgtgtctgccgatcagctggccagagaggaacagatcgagaatcctggcagcggcagctttgtgctgggagccattgctcttggagtggctgctgctgcagctgttacagcaggcgtggccatcgctaagaccatcagactggaaagcgaagtgaccgccatcaacaacgccctgaagaagacaaacgaggccgtcagcacactcggcaatggcgttagagtgctggccacagccgtgcgcgagctgaaggacttcgtgcttaagaacctgtggcgggccattaacaagaacaagtgcgacatcgacgacctgaagatggccgtgtcctttagccagttcaaccggcggtttctgaacgtcgtgcggcagtttagcgacaacgccggaatcacaccagccatcagcctggacctgatgacagatgctgagctggctagagccgtgcctaacatgcctacatctgccggccagatcaagctgatgctcgagaatagagccatggtccgacggaaaggcttcggcattctgattggcgtgtacggcagcagcgtgatctatatggtgcagctgcctatcttcggcgtgatcgacacaccctgctggattgtgaaggccgctcctagctgtagcgagaagaagggcaattacgcctgcctgctgagagaggaccaaggctggtattgtcagaacgccggcagcaccgtgtactaccctaacgagaaggactgcgagacaagaggcgaccacgtgttctgtgataccgccgctggaatcaatgtggccgagcagagcaaagagtgcaacatcaacatcagcaccaccaactatccctgcaaggtgtccaccggcaggcaccctatttctatggtggctctgtctcctctgggagccctggtggcttgttataagggcgtgtcctgtagcatcggcagcaacagagtgggcatcatcaagcagctgaacaagggctgcagctacatcaccaaccaggacgccgataccgtgaccatcgacaacaccgtgtatcagctgagcaaggtggaaggcgaacagcacgtgatcaagggcagacctgtgtccagcagcttcgaccctatcaagttccctgaggatcagttccaggtggccctggaccaggtgttcgagaacatcgagaattcccaggctctggtggaccagtccaacagaatcctgtctagcgccgagaagggaaacaccggcttcatcatcgtgatcatcctgatcgccgtgctgggcagctccatgatcctggtgtccatcttcatcattatcaagaagaccaagaagcccaccggcgctcctccagaactgagcggagtgaccaacaatggcttcatccctcacaac

SEQ ID NO: 140 - RNA, 1617 nt, synthetic construct
  misc_feature 1..1617: note = Synthetic Polynucleotide
  source 1..1617: mol_type = other RNA
atgagctggaaggtggtcatcatcttcagcctgctgatcacacctcagcacggcctgaaagagagctacctggaagagtcctgcagcaccatcacagagggctacctgtctgtgctgagaaccggctggtacaccaacgtgttcacactgcctgtgggcgacgtcgagaatctgacatgctctgatggccctagcctgatcaagaccgagctggatctgaccaagagcgccctgagagaactcaagaccgtgtctgccgatcagctggccagagaggaacagatcgagaatcctggcagcggcagctttgtgctgggagccattgctcttggagtggctgctgctgcagctgttacagcaggcgtggccatcgctaagaccatcagactggaaagcgaagtgaccgccatcaacaacgccctgaagaagacaaacgaggccgtcagcacactcggcaatggcgttagagtgctggccacagccgtgcgcgagctgaaggacttcgtgtccaagaacctgacacgggccattaacaagaacaagtgcgacatcgacgacctgaagatggccgtgtcctttagccagttcaaccggcggtttctgaacgtcgtgcggcagtttagcgacaacgccggaatcacaccagccatcagcctggacctgatgacagatgctgagctggctagagccgtgcctaacatgcctacatctgccggccagatcaagctgatgctcgagaatagagccatggtccgacggaaaggcttcggcattctgattggcgtgtacggcagcagcgtgatctatatggtgcagctgcctatcttcggcgtgatcgacacaccctgctggattgtgaaggccgctcctagctgtagcgagaagaagggcaattacgcctgcctgctgagagaggaccaaggctggtattgtcagaacgccggcagcaccgtgtactaccctaacgagaaggactgcgagacaagaggcgaccacgtgttctgtgataccgccgctggaatcaatgtggccgagcagagcaaagagtgcaacatcaacatcagcaccaccaactatccctgcaaggtgtccaccggcaggcaccctatttctatggtggctctgtctcctctgggagccctggtggcttgttataagggcgtgtcctgtagcatcggcagcaacagagtgggcatcatcaagcagctgaacaagggctgcagctacatcaccaaccaggacgccgataccgtgaccatcgacaacaccgtgtatcagctgagcaaggtggaaggcgaacagcacgtgatcaagggcagacctgtgtccagcagcttcgaccctatcaagttccctgaggatcagttccaggtggccctggaccaggtgttcgagaacatcgagaattcccaggctctggtggaccagtccaacagaatcctgtctagcgccgagaagggaaacaccggcttcatcatcgtgatcatcctgatcgccgtgctgggcagctccatgatcctggtgtccatcttcatcattatcaagaagaccaagaagcccaccggcgctcctccagaactgagcggagtgaccaacaatggcttcatccctcacaac

SEQ ID NO: 141 - RNA, 1617 nt, synthetic construct
  misc_feature 1..1617: note = Synthetic Polynucleotide
  source 1..1617: mol_type = other RNA
atgagctggaaggtggtcatcatcttcagcctgctgatcacacctcagcacggcctgaaagagagctacctggaagagtcctgcagcaccatcacagagggctacctgtctgtgctgagaaccggctggtacaccaacgtgttcacactggaagtgggcgacgtcgagaatctgacatgctctgatggccctagcctgatcaagaccgagctggatctgaccaagagcgccctgagagaactcaagaccgtgtctgccgatcagctggccagagaggaacagatcgagaatcctggcagcggcagctttgtgctgggagccattgctcttggagtggctgctgctgcagctgttacagcaggcgtggccatcgctaagaccatcagactggaaagcgaagtgaccgccatcaacaacgccctgaagaagacaaacgaggccgtcagcacactcggcaatggcgttagagtgctggccacagccgtgcgcgagctgaaggacttcgtgtccaagaacctgacacgggccattaacaagaacaagtgcgacatccctgacctgaagatggccgtgtcctttagccagttcaaccggcggtttctgaacgtcgtgcggcagtttagcgacaacgccggaatcacaccagccatcagcctggacctgatgacagatgctgagctggctagagccgtgcctaacatgcctacatctgccggccagatcaagctgatgctcgagaatagagccatggtccgacggaaaggcttcggcattctgattggcgtgtacggcagcagcgtgatctatatggtgcagctgcctatcttcggcgtgatcgacacaccctgctggattgtgaaggccgctcctagctgtagcgagaagaagggcaattacgcctgcctgctgagagaggaccaaggctggtattgtcagaacgccggcagcaccgtgtactaccctaacgagaaggactgcgagacaagaggcgaccacgtgttctgtgataccgccgctggaatcaatgtggccgagcagagcaaagagtgcaacatcaacatcagcaccaccaactatccctgcaaggtgtccaccggcaggcaccctatttctatggtggctctgtctcctctgggagccctggtggcttgttataagggcgtgtcctgtagcatcggcagcaacagagtgggcatcatcaagcagctgaacaagggctgcagctacatcaccaaccaggacgccgataccgtgaccatcgacaacaccgtgtatcagctgagcaaggtggaaggcgaacagcacgtgatcaagggcagacctgtgtccagcagcttcgaccctatcaagttccctgaggatcagttccaggtggccctggaccaggtgttcgagaacatcgagaattcccaggctctggtggaccagtccaacagaatcctgtctagcgccgagaagggaaacaccggcttcatcatcgtgatcatcctgatcgccgtgctgggcagctccatgatcctggtgtccatcttcatcattatcaagaagaccaagaagcccaccggcgctcctccagaactgagcggagtgaccaacaatggcttcatccctcacaac

SEQ ID NO: 142 - RNA, 1617 nt, synthetic construct
  misc_feature 1..1617: note = Synthetic Polynucleotide
  source 1..1617: mol_type = other RNA
atgagctggaaggtggtcatcatcttcagcctgctgatcacacctcagcacggcctgaaagagagctacctggaagagtcctgcagcaccatcacagagggctacctgtctgtgctgagaaccggctggtacaccaacgtgttcacactggaagtgggcgacgtcgagaatctgacatgctctgatggccctagcctgatcaagaccgagctggatctgaccaagagcgccctgagagaactcaagaccgtgtctgccgatcagctggccagagaggaacagatcgagaatcctggcagcggcagctttgtgctgggagccattgctcttggagtggctgctgctgcagctgttacagcaggcgtggccatcgctaagaccatcagactggaaagcgaagtgaccgccatcaacaacgccctgaagaagacaaacgaggccgtcagcacactcggcaatggcgttagagtgctggccacagccgtgcgcgagctgaaggacttcgtgtccaagaacctgacacgggccattaacaagaacaagtgccctatcgacgacctgaagatggccgtgtcctttagccagttcaaccggcggtttctgaacgtcgtgcggcagtttagcgacaacgccggaatcacaccagccatcagcctggacctgatgacagatgctgagctggctagagccgtgcctaacatgcctacatctgccggccagatcaagctgatgctcgagaatagagccatggtccgacggaaaggcttcggcattctgattggcgtgtacggcagcagcgtgatctatatggtgcagctgcctatcttcggcgtgatcgacacaccctgctggattgtgaaggccgctcctagctgtagcgagaagaagggcaattacgcctgcctgctgagagaggaccaaggctggtattgtcagaacgccggcagcaccgtgtactaccctaacgagaaggactgcgagacaagaggcgaccacgtgttctgtgataccgccgctggaatcaatgtggccgagcagagcaaagagtgcaacatcaacatcagcaccaccaactatccctgcaaggtgtccaccggcaggcaccctatttctatggtggctctgtctcctctgggagccctggtggcttgttataagggcgtgtcctgtagcatcggcagcaacagagtgggcatcatcaagcagctgaacaagggctgcagctacatcaccaaccaggacgccgataccgtgaccatcgacaacaccgtgtatcagctgagcaaggtggaaggcgaacagcacgtgatcaagggcagacctgtgtccagcagcttcgaccctatcaagttccctgaggatcagttccaggtggccctggaccaggtgttcgagaacatcgagaattcccaggctctggtggaccagtccaacagaatcctgtctagcgccgagaagggaaacaccggcttcatcatcgtgatcatcctgatcgccgtgctgggcagctccatgatcctggtgtccatcttcatcattatcaagaagaccaagaagcccaccggcgctcctccagaactgagcggagtgaccaacaatggcttcatccctcacaac

SEQ ID NO: 143 - RNA, 1617 nt, synthetic construct
  misc_feature 1..1617: note = Synthetic Polynucleotide
  source 1..1617: mol_type = other RNA
atgagctggaaggtggtcatcatcttcagcctgctgatcacacctcagcacggcctgaaagagagctacctggaagagtcctgcagcaccatcacagagggctacctgtctgtgctgagaaccggctggtacaccaacgtgttcacactggaagtgggcgacgtcgagaatctgacatgctctgatggccctagcctgatcaagaccgagctggatctgaccaagagcgccctgagagaactcaagaccgtgtctgccgatcagctggccagagaggaacagatcgagaatcctggcagcggcagctttgtgctgggagccattgctcttggagtggctgctgctgcagctgttacagcaggcgtggccatcgctaagaccatcagactgcctagcgaagtgaccgccatcaacaacgccctgaagaagacaaacgaggccgtcagcacactcggcaatggcgttagagtgctggccacagccgtgcgcgagctgaaggacttcgtgtccaagaacctgacacgggccattaacaagaacaagtgcgacatcgacgacctgaagatggccgtgtcctttagccagttcaaccggcggtttctgaacgtcgtgcggcagtttagcgacaacgccggaatcacaccagccatcagcctggacctgatgacagatgctgagctggctagagccgtgcctaacatgcctacatctgccggccagatcaagctgatgctcgagaatagagccatggtccgacggaaaggcttcggcattctgattggcgtgtacggcagcagcgtgatctatatggtgcagctgcctatcttcggcgtgatcgacacaccctgctggattgtgaaggccgctcctagctgtagcgagaagaagggcaattacgcctgcctgctgagagaggaccaaggctggtattgtcagaacgccggcagcaccgtgtactaccctaacgagaaggactgcgagacaagaggcgaccacgtgttctgtgataccgccgctggaatcaatgtggccgagcagagcaaagagtgcaacatcaacatcagcaccaccaactatccctgcaaggtgtccaccggcaggcaccctatttctatggtggctctgtctcctctgggagccctggtggcttgttataagggcgtgtcctgtagcatcggcagcaacagagtgggcatcatcaagcagctgaacaagggctgcagctacatcaccaaccaggacgccgataccgtgaccatcgacaacaccgtgtatcagctgagcaaggtggaaggcgaacagcacgtgatcaagggcagacctgtgtccagcagcttcgaccctatcaagttccctgaggatcagttccaggtggccctggaccaggtgttcgagaacatcgagaattcccaggctctggtggaccagtccaacagaatcctgtctagcgccgagaagggaaacaccggcttcatcatcgtgatcatcctgatcgccgtgctgggcagctccatgatcctggtgtccatcttcatcattatcaagaagaccaagaagcccaccggcgctcctccagaactgagcggagtgaccaacaatggcttcatccctcacaac

SEQ ID NO: 144 - RNA, 1617 nt, synthetic construct
  misc_feature 1..1617: note = Synthetic Polynucleotide
  source 1..1617: mol_type = other RNA
atgagctggaaggtggtcatcatcttcagcctgctgatcacacctcagcacggcctgaaagagagctacctggaagagtcctgcagcaccatcacagagggctacctgtctgtgctgagaaccggctggtacaccaacgtgttcacactggaagtgggcgacgtcgagaatctgacatgctctgatggccctagcctgatcaagaccgagctggatctgaccaagagcgccctgagagaactcaagaccgtgtctgccgatcagctggccagagaggaacagatcgagaatcctggcagcggcagctttgtgctgggagccattgctcttggagtggctgctgctgcagctgttacagcaggcgtggccatcgctaagaccatcagactggaaagcgaagtgaccgccatcaacaacgccctgaagaagacaaacgaggccgtcagcacactcggcaatggcgttagagtgctggccacagccgtgcgcgagctgaaggacttcgtgtccaagaacctgacacgggccattaacaagaacaagtgcgacatcgacgacctgaagatggccgtgtcctttagccagttcaaccggcggtttctgaacgtcgtgcggcagtttagcgacaacgccggaatcacaccagccatcagcctggacctgatgacagatgctgagctggctagagccgtgcctaacatgcctacatctgccggccagatcaagctgatgctcgagaatagagccatggtccgacggaaaggcttcggcattctgattggcgtgtacggcagcagcgtgatctatatggtgcagctgcctatcttcggcgtgatcgacacaccctgctggattgtgaaggccgctcctagctgtagcgagaagaagggcaattacgcctgcctgctgagagaggaccaaggctggtattgtcagaacgccggcagcaccgtgtactaccctaacgagaaggactgcgagacaagaggcgaccacgtgttctgtgataccgccgctggaatcaatgtggccgagcagagcaaagagtgcaacatcaacatcagcaccaccaactatccctgcaaggtgtccaccggcaggcaccctatttctatggtggctctgtctcctctgggagccctggtggcttgttataagggcgtgtcctgtagcatcggcagcaacagagtgggcatcatcaagcagctgaacaagggctgcagctacatcaccaaccaggacgccgataccgtgaccatcgacaacaccgtgtatcagctgagcaaggtggaaggcgaacagcacgtgatcaagggcagacctgtgtccagcagcttcccacctatcaagttccctgaggatcagttccaggtggccctggaccaggtgttcgagaacatcgagaattcccaggctctggtggaccagtccaacagaatcctgtctagcgccgagaagggaaacaccggcttcatcatcgtgatcatcctgatcgccgtgctgggcagctccatgatcctggtgtccatcttcatcattatcaagaagaccaagaagcccaccggcgctcctccagaactgagcggagtgaccaacaatggcttcatccctcacaac

SEQ ID NO: 145 - RNA, 1617 nt, synthetic construct
  misc_feature 1..1617: note = Synthetic Polynucleotide
  source 1..1617: mol_type = other RNA
atgagctggaaggtggtcatcatcttcagcctgctgatcacacctcagcacggcctgaaagagagctacctggaagagtcctgcagcaccatcacagagggctacctgtctgtgctgagaaccggctggtacaccaacgtgttcacactggaagtgggcgacgtcgagaatctgacatgctctgatggccctagcctgatcaagaccgagctggatctgaccaagagcgccctgagagaactcaagaccgtgtctgccgatcagctggccagagaggaacagatcgagaatcctggcagcggcagctttgtgctgggagccattgctcttggagtggctgctgctgcagctgttacagcaggcgtggccatcgctaagaccatcagactggaaagcgaagtgaccgccatcaacaacgccctgaagaagacaaacgaggccgtcagcacactcggcaatggcgttagagtgctggccacagccgtgcgcgagctgaaggacttcgtgtccaagaacctgacacgggccattaacaagaacaagtgcgacatcgacgacctgaagatggccgtgtcctttagccagttcaaccggcggtttctgaacgtcgtgcggcagtttagcgacaacgccggaatcacaccagccatcagcctggacctgatgacagatgctgagctggctagagccgtgcctaacatgcctacatctgccggccagatcaagctgatgctcgagaatagagccatggtccgacggaaaggcttcggcattctgattggcgtgtacggcagcagcgtgatctatatggtgcagctgcctatcttcggcgtgatcgacacaccctgctggattgtgaaggccgctcctagctgtagcgagaagaagggcaattacgcctgcctgctgagagaggaccaaggctggtattgtcagaacgccggcagcaccgtgtactaccctaacgagaaggactgcgagacaagaggcgaccacgtgttctgtgataccgccgctggaatcaatgtggccgagcagagcaaagagtgcaacatcaacatcagcaccaccaactatccctgcaaggtgtccaccggcaggcaccctatttctatggtggctctgtctcctctgggagccctggtggcttgttataagggcgtgtcctgtagcatcggcagcaacagagtgggcatcatcaagcagctgaacaagggctgcagctacatcaccaaccaggacgccgataccgtgaccatcgacaacaccgtgtatcagctgagcaaggtggaaggcgaacagcacgtgatcaagggcagacctgtgtccagcagcttcgaccctatcaagttccctgagaaccagttccaggtggccctggaccaggtgttcgagaacatcgagaattcccaggctctggtggaccagtccaacagaatcctgtctagcgccgagaagggaaacaccggcttcatcatcgtgatcatcctgatcgccgtgctgggcagctccatgatcctggtgtccatcttcatcattatcaagaagaccaagaagcccaccggcgctcctccagaactgagcggagtgaccaacaatggcttcatccctcacaac

SEQ ID NO: 146 - RNA, 1617 nt, synthetic construct
  misc_feature 1..1617: note = Synthetic Polynucleotide
  source 1..1617: mol_type = other RNA
atgagctggaaggtggtcatcatcttcagcctgctgatcacacctcagcacggcctgaaagagagctacctggaagagtcctgcagcaccatcacagagggctacctgtctgtgctgagaaccggctggtacaccaacgtgttcacactggaagtgggcgacgtcgagaatctgacatgctctgatggccctagcctgatcaagaccgagctggatctgaccaagagcgccctgagagaactcaagaccgtgtctgccgatcagctggccagagaggaacagatcgagaatcctggcagcggcagctttgtgctgggagccattgctcttggagtggctgctgctgcagctgttacagcaggcgtggccatcgctaagaccatcagactggaaagcgaagtgaccgccatcaacaacgccctgaagaagacaaacgaggccgtcagcacactcggcaatggcgttagagtgctggccacagccgtgcgcgagctgaaggacttcgtgtccaagaacctgacacgggccattaacaagaacaagtgcgacatcgacgacctgaagatggccgtgtcctttagccagttcaaccggcggtttctgaacgtcgtgcggcagtttagcgacaacgccggaatcacaccagccatcagcctggacctgatgacagatgctgagctggctagagccgtgcctaacatgcctacatctgccggccagatcaagctgatgctcgagaatagagccatggtccgacggaaaggcttcggcattctgattggcgtgtacggcagcagcgtgatctatatggtgcagctgcctatcttcggcgtgatcgacacaccctgctggattgtgaaggccgctcctagctgtagcgagaagaagggcaattacgcctgcctgctgagagaggaccaaggctggtattgtcagaacgccggcagcaccgtgtactaccctaacgagaaggactgcgagacaagaggcgaccacgtgttctgtgataccgccgctggaatcaatgtggccgagcagagcaaagagtgcaacatcaacatcagcaccaccaactatccctgcaaggtgtccaccggcaggcaccctatttctatggtggctctgtctcctctgggagccctggtggcttgttataagggcgtgtcctgtagcatcggcagcaacagagtgggcatcatcaagcagctgaacaagggctgcagctacatcaccaaccaggacgccgataccgtgaccatcgacaacaccgtgtatcagctgagcaaggtggaaggcgaacagcacgtgatcaagggcagacctgtgtccagcagcttcgaccctatcaagttccctcaggatcagttccaggtggccctggaccaggtgttcgagaacatcgagaattcccaggctctggtggaccagtccaacagaatcctgtctagcgccgagaagggaaacaccggcttcatcatcgtgatcatcctgatcgccgtgctgggcagctccatgatcctggtgtccatcttcatcattatcaagaagaccaagaagcccaccggcgctcctccagaactgagcggagtgaccaacaatggcttcatccctcacaac

SEQ ID NO: 147 - RNA, 1617 nt, synthetic construct
  misc_feature 1..1617: note = Synthetic Polynucleotide
  source 1..1617: mol_type = other RNA
atgagctggaaggtggtcatcatcttcagcctgctgatcacacctcagcacggcctgaaagagagctacctggaagagtcctgcagcaccatcacagagggctacctgtctgtgctgagaaccggctggtacaccaacgtgttcacactggaagtgggcgacgtcgagaatctgacatgctctgatggccctagcctgatcaagaccgagctggatctgaccaagagcgccctgagagaactcaagaccgtgtctgccgatcagctggccagagaggaacagatcgagaatcctggcagcggcagctttgtgctgggagccattgctcttggagtggctgctgctgcagctgttacagcaggcgtggccatcgctaagaccatcagactggaaagcgaagtgaccgccatcaacaacgccctgaagaagacaaacgaggccgtcagcacactcggcaatggcgttagagtgctggccacagccgtgcgcgagctgaaggacttcgtgtccaagaacctgacacgggccattaacaagaacaagtgcgacatcgacgacctgaagatggccgtgtcctttagccagtggaaccggcggtttctgaacgtcgtgcggcagtttagcgacaacgccggaatcacaccagccatcagcctggacctgatgacagatgctgagctggctagagccgtgcctaacatgcctacatctgccggccagatcaagctgatgctcgagaatagagccatggtccgacggaaaggcttcggcattctgattggcgtgtacggcagcagcgtgatctatatggtgcagctgcctatcttcggcgtgatcgacacaccctgctggattgtgaaggccgctcctagctgtagcgagaagaagggcaattacgcctgcctgctgagagaggaccaaggctggtattgtcagaacgccggcagcaccgtgtactaccctaacgagaaggactgcgagacaagaggcgaccacgtgttctgtgataccgccgctggaatcaatgtggccgagcagagcaaagagtgcaacatcaacatcagcaccaccaactatccctgcaaggtgtccaccggcaggcaccctatttctatggtggctctgtctcctctgggagccctggtggcttgttataagggcgtgtcctgtagcatcggcagcaacagagtgggcatcatcaagcagctgaacaagggctgcagctacatcaccaaccaggacgccgataccgtgaccatcgacaacaccgtgtatcagctgagcaaggtggaaggcgaacagcacgtgatcaagggcagacctgtgtccagcagcttcgaccctatcaagttccctgaggatcagttccaggtggccctggaccaggtgttcgagaacatcgagaattcccaggctctggtggaccagtccaacagaatcctgtctagcgccgagaagggaaacaccggcttcatcatcgtgatcatcctgatcgccgtgctgggcagctccatgatcctggtgtccatcttcatcattatcaagaagaccaagaagcccaccggcgctcctccagaactgagcggagtgaccaacaatggcttcatccctcacaac

SEQ ID NO: 148 - protein, 560 aa, Influenza A virus
MNTQILVFALIAIIPTNADKICLGHHAVSNGTKVNTLTERGVEVVNATETVERTNIPRICSKGKKTVDLGQCGLLGTITGPPQCDQFLEFSADLIIERREGSDVCYPGKFVNEEALRQILRESGGIDKEAMGFTYSGIRTNGATSACRRSGSSFYAEMKWLLSNTDNAAFPQMTKSYKNTRKSPALIVWGIHHSVSTAEQTKLYGSGNKLVTVGSSNYQQSFVPSPGARPQVNGQSGRIDFHWLMLNPNDTVTFSFNGAFIAPDRASFLRGKSMGIQSGVQVDANCEGDCYHSGGTIISNLPFQNIDSRAVGKCPRYVKQRSLLLATGMKNVPEIPKGRGLFGAIAGFIENGWEGLIDGWYGFRHQNAQGEGTAADYKSTQSAIDQITGKLNRLIEKTNQQFELIDNEFNEVEKQIGNVINWTRDSITEVWSYNAELLVAMENQHTIDLADSEMDKLYERVKRQLRENAEEDGTGCFEIFHKCDDDCMASIRNNTYDHSKYREEAMQNRIQIDPVKLSSGYKDVILWFSFGASCFILLAIVMGLVFICVKNGNMRCTICI

SEQ ID NO: 149 - RNA, 1953 nt, synthetic construct
  misc_feature 1..1953: note = Synthetic Polynucleotide
  misc_feature 1: note = Modified by 7MeGpppG2'OMe
  misc_feature 1953: note = Modified by OH
  source 1..1953: mol_type = other RNA
ggaaataagagagaaaagaagagtaagaagaaatataagagccaccatgtacaaaatcgtcgtcattatcgcattgctgggcgctgtcaagggactcgacaagatctgtctcggacaccacgcggtggctaacggaaccatcgtcaagaccctgactaacgagcaggaagaagtgaccaacgccaccgaaactgtggaatccaccgggatcaacagattgtgcatgaagggtcggaagcacaaggatctgggaaactgccacccgattggaatgctcatcggcaccccggcatgcgatctgcatctgactgggatgtgggatacccttatcgagcgggaaaacgcgatcgcatactgttaccccggtgccaccgtgaacgtggaggcgctcagacagaagattatggagtcaggcggcatcaacaagatttccacgggcttcacctacgggtcctccattaactccgccggtaccactcgggcctgcatgcggaacggagggaactccttttacgccgagctcaagtggcttgtgtcaaaatccaagggacagaatttcccccaaaccaccaacacctataggaacaccgacaccgccgaacatctcattatgtggggcatccatcacccttcgagcacacaggagaagaatgacctctacggcacccagtcgctgagcatctccgtgggctcatcgacctatcgcaacaacttcgtgcctgtggtcggcgcccgacctcaagtcaacggacagtccggacgcattgacttccattggactctggtgcaaccgggagacaacatcactttctcccacaacggcggactgattgccccaagccgcgtgtcaaagctgatcggtagagggctgggtattcagtcggatgctcccatcgataacaactgcgaatccaagtgcttttggagaggcggctccatcaatactcggctgccgtttcagaacctgagcccgaggaccgtggggcagtgcccaaaatacgtgaatcgccggtcactgatgctggcgaccggaatgaggaacgtgcctgaactcatccagggacgggggctgttcggcgccatcgccggcttcctggaaaacggatgggagggaatggtggacggttggtacggcttccgccaccaaaacgcccagggaactggacaggccgccgactacaagtccacacaggccgcaatagaccagatcactgggaagctcaaccgccttgtggaaaagactaacactgaattcgagtcgatcgagtctgagttctccgagatcgaacaccagattgggaacgtgatcaactggacgaaggactccattaccgacatctggacctaccaggcggaactgctcgtggcgatggagaaccagcacactatcgacatggccgactccgagatgctgaatctgtacgaacgcgtgcggaagcaactgagacaaaacgctgaagaagatggaaagggttgtttcgagatctaccacgcctgcgacgacagctgcatggaaagcattaggaacaatacctacgaccactcgcagtaccgggaggaggcccttctgaaccggctgaacattaaccccgtgaccttgagctccggctacaaggacatcatcctgtggttctcgtttggagccagctgcttcgtgctgctggccgtcgtgatgggattgttcttcttctgcctgaaaaacggaaacatgcgctgcaccatctgtatttgataataggctggagcctcggtggccatgcttcttgccccttgggcctccccccagcccctcctccccttcctgcacccgtacccccgtggtctttgaataaagtctgagtgggcggcaaaaaaaaaaaaaaaaaaaaaaaaaaaaaaaaaaaaaaaaaaaaaaaaaaaaaaaaaaaaaaaaaaaaaaaaaaaaaaaaaaaaaaaaaaaaaaaaaaaatctag

SEQ ID NO: 150 - DNA, 1683 bp, synthetic construct
  misc_feature 1..1683: note = Synthetic Polynucleotide
  source 1..1683: mol_type = other DNA
atgtacaaaatcgtcgtcattatcgcattgctgggcgctgtcaagggactcgacaagatctgtctcggacaccacgcggtggctaacggaaccatcgtcaagaccctgactaacgagcaggaagaagtgaccaacgccaccgaaactgtggaatccaccgggatcaacagattgtgcatgaagggtcggaagcacaaggatctgggaaactgccacccgattggaatgctcatcggcaccccggcatgcgatctgcatctgactgggatgtgggatacccttatcgagcgggaaaacgcgatcgcatactgttaccccggtgccaccgtgaacgtggaggcgctcagacagaagattatggagtcaggcggcatcaacaagatttccacgggcttcacctacgggtcctccattaactccgccggtaccactcgggcctgcatgcggaacggagggaactccttttacgccgagctcaagtggcttgtgtcaaaatccaagggacagaatttcccccaaaccaccaacacctataggaacaccgacaccgccgaacatctcattatgtggggcatccatcacccttcgagcacacaggagaagaatgacctctacggcacccagtcgctgagcatctccgtgggctcatcgacctatcgcaacaacttcgtgcctgtggtcggcgcccgacctcaagtcaacggacagtccggacgcattgacttccattggactctggtgcaaccgggagacaacatcactttctcccacaacggcggactgattgccccaagccgcgtgtcaaagctgatcggtagagggctgggtattcagtcggatgctcccatcgataacaactgcgaatccaagtgcttttggagaggcggctccatcaatactcggctgccgtttcagaacctgagcccgaggaccgtggggcagtgcccaaaatacgtgaatcgccggtcactgatgctggcgaccggaatgaggaacgtgcctgaactcatccagggacgggggctgttcggcgccatcgccggcttcctggaaaacggatgggagggaatggtggacggttggtacggcttccgccaccaaaacgcccagggaactggacaggccgccgactacaagtccacacaggccgcaatagaccagatcactgggaagctcaaccgccttgtggaaaagactaacactgaattcgagtcgatcgagtctgagttctccgagatcgaacaccagattgggaacgtgatcaactggacgaaggactccattaccgacatctggacctaccaggcggaactgctcgtggcgatggagaaccagcacactatcgacatggccgactccgagatgctgaatctgtacgaacgcgtgcggaagcaactgagacaaaacgctgaagaagatggaaagggttgtttcgagatctaccacgcctgcgacgacagctgcatggaaagcattaggaacaatacctacgaccactcgcagtaccgggaggaggcccttctgaaccggctgaacattaaccccgtgaccttgagctccggctacaaggacatcatcctgtggttctcgtttggagccagctgcttcgtgctgctggccgtcgtgatgggattgttcttcttctgcctgaaaaacggaaacatgcgctgcaccatctgtatt

SEQ ID NO: 151 - protein, 561 aa, Influenza A virus
MYKIVVIIALLGAVKGLDKICLGHHAVANGTIVKTLTNEQEEVTNATETVESTGINRLCMKGRKHKDLGNCHPIGMLIGTPACDLHLTGMWDTLIERENAIAYCYPGATVNVEALRQKIMESGGINKISTGFTYGSSINSAGTTRACMRNGGNSFYAELKWLVSKSKGQNFPQTTNTYRNTDTAEHLIMWGIHHPSSTQEKNDLYGTQSLSISVGSSTYRNNFVPVVGARPQVNGQSGRIDFHWTLVQPGDNITFSHNGGLIAPSRVSKLIGRGLGIQSDAPIDNNCESKCFWRGGSINTRLPFQNLSPRTVGQCPKYVNRRSLMLATGMRNVPELIQGRGLFGAIAGFLENGWEGMVDGWYGFRHQNAQGTGQAADYKSTQAAIDQITGKLNRLVEKTNTEFESIESEFSEIEHQIGNVINWTKDSITDIWTYQAELLVAMENQHTIDMADSEMLNLYERVRKQLRQNAEEDGKGCFEIYHACDDSCMESIRNNTYDHSQYREEALLNRLNINPVTLSSGYKDIILWFSFGASCFVLLAVVMGLFFFCLKNGNMRCTICI

SEQ ID NO: 152 - DNA, 1891 bp, synthetic construct
  misc_feature 1..1891: note = Synthetic Polynucleotide
  source 1..1891: mol_type = other DNA
tcaagcttttggaccctcgtacagaagctaatacgactcactatagggaaataagagagaaaagaagagtaagaagaaatataagagccaccatgaatacccagattctcgtgttcgccctcatcgctatcatcccaaccaatgccgacaagatctgcttgggtcatcatgcggtgtcgaacggaaccaaggtcaacaccctgaccgagcggggagtggaagtggtcaacgctactgaaacggtggaaaggactaatatcccacgcatctgctcaaagggaaagaaaactgtggatctcggacagtgtggacttctggggaccatcacgggtccaccgcaatgcgatcagtttctggagttcagcgcagatctgatcatcgagcgcagagaagggtccgacgtttgttaccctggaaagttcgtgaacgaagaggcactgcgccaaatcttgcgggagagcggcggcattgacaaagaggccatgggattcacctactcgggtattcgcactaacggtgccacttctgcgtgccggcgttccgggtcctccttctatgccgagatgaagtggctcctgtcgaacaccgacaacgcagcttttccgcaaatgactaagtcctacaaaaacactagaaagtcgccggcactgatcgtctggggaatccatcactccgtgtctactgcggagcaaactaagctgtacggcagcggaaacaagctcgtgaccgtcggttcatcgaactaccagcagagctttgtgccaagccccggagcgaggccccaggtcaacgggcagagcggacgcatcgacttccactggctgatgctcaatccgaatgacaccgtgaccttctcgttcaatggcgccttcatcgcacctgaccgcgccagcttcctgagaggaaagtcaatgggcatacagtcgggcgtccaagtggatgccaactgcgagggagactgctatcactccggcggaaccatcatctccaatttgccgtttcaaaacatcgactcgcgcgcagtgggaaagtgtccgcgatacgtgaagcagagatcactgctgctggccactgggatgaagaacgtgcctgaaatcccgaaaggaagggggttgttcggcgctattgcgggcttcatcgaaaacggatgggaggggctcatcgatggttggtacggattcaggcaccagaacgcgcagggggaaggaacggccgctgattacaagtcaactcaatcggccattgaccaaatcactggcaaactgaatcgcctgatcgaaaagaccaatcagcagtttgagttgatcgacaacgaattcaacgaagtggagaaacagattggcaatgtcatcaattggaccagagatagcatcacggaagtctggtcgtacaacgccgaactcctggttgcgatggaaaatcaacacaccatcgacctggccgactccgaaatggacaaactctacgagcgggtcaaacgccagctgcgcgaaaacgcagaagaagatggaaccggatgcttcgagatctttcataagtgcgacgacgattgcatggccagcatccggaacaatacctacgatcactccaagtaccgggaggaagcgatgcaaaatcggatccagattgacccggtcaaactgtcgtcaggctacaaggatgtgatcctttggttctcattcggagcgtcctgttttatccttctggctattgtgatgggcctggtgttcatctgcgtgaagaacggaaacatgcgctgcactatctgcatctgataataggctggagcctcggtggccatgcttcttgccccttgggcctccccccagcccctcctccccttcctgcacccgtacccccgtggtctttgaataaagtctgagtgggcggc

SEQ ID NO: 153 - RNA, 1891 nt, synthetic construct
  misc_feature 1..1891: note = Synthetic Polynucleotide
  source 1..1891: mol_type = other RNA
tcaagcttttggaccctcgtacagaagctaatacgactcactatagggaaataagagagaaaagaagagtaagaagaaatataagagccaccatgaatacccagattctcgtgttcgccctcatcgctatcatcccaaccaatgccgacaagatctgcttgggtcatcatgcggtgtcgaacggaaccaaggtcaacaccctgaccgagcggggagtggaagtggtcaacgctactgaaacggtggaaaggactaatatcccacgcatctgctcaaagggaaagaaaactgtggatctcggacagtgtggacttctggggaccatcacgggtccaccgcaatgcgatcagtttctggagttcagcgcagatctgatcatcgagcgcagagaagggtccgacgtttgttaccctggaaagttcgtgaacgaagaggcactgcgccaaatcttgcgggagagcggcggcattgacaaagaggccatgggattcacctactcgggtattcgcactaacggtgccacttctgcgtgccggcgttccgggtcctccttctatgccgagatgaagtggctcctgtcgaacaccgacaacgcagcttttccgcaaatgactaagtcctacaaaaacactagaaagtcgccggcactgatcgtctggggaatccatcactccgtgtctactgcggagcaaactaagctgtacggcagcggaaacaagctcgtgaccgtcggttcatcgaactaccagcagagctttgtgccaagccccggagcgaggccccaggtcaacgggcagagcggacgcatcgacttccactggctgatgctcaatccgaatgacaccgtgaccttctcgttcaatggcgccttcatcgcacctgaccgcgccagcttcctgagaggaaagtcaatgggcatacagtcgggcgtccaagtggatgccaactgcgagggagactgctatcactccggcggaaccatcatctccaatttgccgtttcaaaacatcgactcgcgcgcagtgggaaagtgtccgcgatacgtgaagcagagatcactgctgctggccactgggatgaagaacgtgcctgaaatcccgaaaggaagggggttgttcggcgctattgcgggcttcatcgaaaacggatgggaggggctcatcgatggttggtacggattcaggcaccagaacgcgcagggggaaggaacggccgctgattacaagtcaactcaatcggccattgaccaaatcactggcaaactgaatcgcctgatcgaaaagaccaatcagcagtttgagttgatcgacaacgaattcaacgaagtggagaaacagattggcaatgtcatcaattggaccagagatagcatcacggaagtctggtcgtacaacgccgaactcctggttgcgatggaaaatcaacacaccatcgacctggccgactccgaaatggacaaactctacgagcgggtcaaacgccagctgcgcgaaaacgcagaagaagatggaaccggatgcttcgagatctttcataagtgcgacgacgattgcatggccagcatccggaacaatacctacgatcactccaagtaccgggaggaagcgatgcaaaatcggatccagattgacccggtcaaactgtcgtcaggctacaaggatgtgatcctttggttctcattcggagcgtcctgttttatccttctggctattgtgatgggcctggtgttcatctgcgtgaagaacggaaacatgcgctgcactatctgcatctgataataggctggagcctcggtggccatgcttcttgccccttgggcctccccccagcccctcctccccttcctgcacccgtacccccgtggtctttgaataaagtctgagtgggcggc

SEQ ID NO: 154 - RNA, 1680 nt, synthetic construct
  misc_feature 1..1680: note = Synthetic Polynucleotide
  source 1..1680: mol_type = other RNA
atgaatacccagattctcgtgttcgccctcatcgctatcatcccaaccaatgccgacaagatctgcttgggtcatcatgcggtgtcgaacggaaccaaggtcaacaccctgaccgagcggggagtggaagtggtcaacgctactgaaacggtggaaaggactaatatcccacgcatctgctcaaagggaaagaaaactgtggatctcggacagtgtggacttctggggaccatcacgggtccaccgcaatgcgatcagtttctggagttcagcgcagatctgatcatcgagcgcagagaagggtccgacgtttgttaccctggaaagttcgtgaacgaagaggcactgcgccaaatcttgcgggagagcggcggcattgacaaagaggccatgggattcacctactcgggtattcgcactaacggtgccacttctgcgtgccggcgttccgggtcctccttctatgccgagatgaagtggctcctgtcgaacaccgacaacgcagcttttccgcaaatgactaagtcctacaaaaacactagaaagtcgccggcactgatcgtctggggaatccatcactccgtgtctactgcggagcaaactaagctgtacggcagcggaaacaagctcgtgaccgtcggttcatcgaactaccagcagagctttgtgccaagccccggagcgaggccccaggtcaacgggcagagcggacgcatcgacttccactggctgatgctcaatccgaatgacaccgtgaccttctcgttcaatggcgccttcatcgcacctgaccgcgccagcttcctgagaggaaagtcaatgggcatacagtcgggcgtccaagtggatgccaactgcgagggagactgctatcactccggcggaaccatcatctccaatttgccgtttcaaaacatcgactcgcgcgcagtgggaaagtgtccgcgatacgtgaagcagagatcactgctgctggccactgggatgaagaacgtgcctgaaatcccgaaaggaagggggttgttcggcgctattgcgggcttcatcgaaaacggatgggaggggctcatcgatggttggtacggattcaggcaccagaacgcgcagggggaaggaacggccgctgattacaagtcaactcaatcggccattgaccaaatcactggcaaactgaatcgcctgatcgaaaagaccaatcagcagtttgagttgatcgacaacgaattcaacgaagtggagaaacagattggcaatgtcatcaattggaccagagatagcatcacggaagtctggtcgtacaacgccgaactcctggttgcgatggaaaatcaacacaccatcgacctggccgactccgaaatggacaaactctacgagcgggtcaaacgccagctgcgcgaaaacgcagaagaagatggaaccggatgcttcgagatctttcataagtgcgacgacgattgcatggccagcatccggaacaatacctacgatcactccaagtaccgggaggaagcgatgcaaaatcggatccagattgacccggtcaaactgtcgtcaggctacaaggatgtgatcctttggttctcattcggagcgtcctgttttatccttctggctattgtgatgggcctggtgttcatctgcgtgaagaacggaaacatgcgctgcactatctgcatc

SEQ ID NO: 155 - RNA, 1683 nt, synthetic construct
  misc_feature 1..1683: note = Synthetic Polynucleotide
  source 1..1683: mol_type = other RNA
atgtacaaaatcgtcgtcattatcgcattgctgggcgctgtcaagggactcgacaagatctgtctcggacaccacgcggtggctaacggaaccatcgtcaagaccctgactaacgagcaggaagaagtgaccaacgccaccgaaactgtggaatccaccgggatcaacagattgtgcatgaagggtcggaagcacaaggatctgggaaactgccacccgattggaatgctcatcggcaccccggcatgcgatctgcatctgactgggatgtgggatacccttatcgagcgggaaaacgcgatcgcatactgttaccccggtgccaccgtgaacgtggaggcgctcagacagaagattatggagtcaggcggcatcaacaagatttccacgggcttcacctacgggtcctccattaactccgccggtaccactcgggcctgcatgcggaacggagggaactccttttacgccgagctcaagtggcttgtgtcaaaatccaagggacagaatttcccccaaaccaccaacacctataggaacaccgacaccgccgaacatctcattatgtggggcatccatcacccttcgagcacacaggagaagaatgacctctacggcacccagtcgctgagcatctccgtgggctcatcgacctatcgcaacaacttcgtgcctgtggtcggcgcccgacctcaagtcaacggacagtccggacgcattgacttccattggactctggtgcaaccgggagacaacatcactttctcccacaacggcggactgattgccccaagccgcgtgtcaaagctgatcggtagagggctgggtattcagtcggatgctcccatcgataacaactgcgaatccaagtgcttttggagaggcggctccatcaatactcggctgccgtttcagaacctgagcccgaggaccgtggggcagtgcccaaaatacgtgaatcgccggtcactgatgctggcgaccggaatgaggaacgtgcctgaactcatccagggacgggggctgttcggcgccatcgccggcttcctggaaaacggatgggagggaatggtggacggttggtacggcttccgccaccaaaacgcccagggaactggacaggccgccgactacaagtccacacaggccgcaatagaccagatcactgggaagctcaaccgccttgtggaaaagactaacactgaattcgagtcgatcgagtctgagttctccgagatcgaacaccagattgggaacgtgatcaactggacgaaggactccattaccgacatctggacctaccaggcggaactgctcgtggcgatggagaaccagcacactatcgacatggccgactccgagatgctgaatctgtacgaacgcgtgcggaagcaactgagacaaaacgctgaagaagatggaaagggttgtttcgagatctaccacgcctgcgacgacagctgcatggaaagcattaggaacaatacctacgaccactcgcagtaccgggaggaggcccttctgaaccggctgaacattaaccccgtgaccttgagctccggctacaaggacatcatcctgtggttctcgtttggagccagctgcttcgtgctgctggccgtcgtgatgggattgttcttcttctgcctgaaaaacggaaacatgcgctgcaccatctgtatt

SEQ ID NO: 156 - RNA, 1997 nt, synthetic construct
  misc_feature 1..1997: note = Synthetic Polynucleotide
  source 1..1997: mol_type = other RNA
tcaagcttttggaccctcgtacagaagctaatacgactcactatagggaaataagagagaaaagaagagtaagaagaaatataagagccaccatgaatacccagattctcgtgttcgccctcatcgctatcatcccaaccaatgccgacaagatctgcttgggtcatcatgcggtgtcgaacggaaccaaggtcaacaccctgaccgagcggggagtggaagtggtcaacgctactgaaacggtggaaaggactaatatcccacgcatctgctcaaagggaaagaaaactgtggatctcggacagtgtggacttctggggaccatcacgggtccaccgcaatgcgatcagtttctggagttcagcgcagatctgatcatcgagcgcagagaagggtccgacgtttgttaccctggaaagttcgtgaacgaagaggcactgcgccaaatcttgcgggagagcggcggcattgacaaagaggccatgggattcacctactcgggtattcgcactaacggtgccacttctgcgtgccggcgttccgggtcctccttctatgccgagatgaagtggctcctgtcgaacaccgacaacgcagcttttccgcaaatgactaagtcctacaaaaacactagaaagtcgccggcactgatcgtctggggaatccatcactccgtgtctactgcggagcaaactaagctgtacggcagcggaaacaagctcgtgaccgtcggttcatcgaactaccagcagagctttgtgccaagccccggagcgaggccccaggtcaacgggcagagcggacgcatcgacttccactggctgatgctcaatccgaatgacaccgtgaccttctcgttcaatggcgccttcatcgcacctgaccgcgccagcttcctgagaggaaagtcaatgggcatacagtcgggcgtccaagtggatgccaactgcgagggagactgctatcactccggcggaaccatcatctccaatttgccgtttcaaaacatcgactcgcgcgcagtgggaaagtgtccgcgatacgtgaagcagagatcactgctgctggccactgggatgaagaacgtgcctgaaatcccgaaaggaagggggttgttcggcgctattgcgggcttcatcgaaaacggatgggaggggctcatcgatggttggtacggattcaggcaccagaacgcgcagggggaaggaacggccgctgattacaagtcaactcaatcggccattgaccaaatcactggcaaactgaatcgcctgatcgaaaagaccaatcagcagtttgagttgatcgacaacgaattcaacgaagtggagaaacagattggcaatgtcatcaattggaccagagatagcatcacggaagtctggtcgtacaacgccgaactcctggttgcgatggaaaatcaacacaccatcgacctggccgactccgaaatggacaaactctacgagcgggtcaaacgccagctgcgcgaaaacgcagaagaagatggaaccggatgcttcgagatctttcataagtgcgacgacgattgcatggccagcatccggaacaatacctacgatcactccaagtaccgggaggaagcgatgcaaaatcggatccagattgacccggtcaaactgtcgtcaggctacaaggatgtgatcctttggttctcattcggagcgtcctgttttatccttctggctattgtgatgggcctggtgttcatctgcgtgaagaacggaaacatgcgctgcactatctgcatctgataataggctggagcctcggtggccatgcttcttgccccttgggcctccccccagcccctcctccccttcctgcacccgtacccccgtggtctttgaataaagtctgagtgggcggcaaaaaaaaaaaaaaaaaaaaaaaaaaaaaaaaaaaaaaaaaaaaaaaaaaaaaaaaaaaaaaaaaaaaaaaaaaaaaaaaaaaaaaaaaaaaaaaaaaaatctaga

SEQ ID NO: 157 - DNA, 1961 bp, Human herpesvirus 2
  source 1..1961: mol_type = genomic DNA
tcaagcttttggaccctcgtacagaagctaatacgactcactatagggaaataagagagaaaagaagagtaagaagaaatataagagccaccatgagaggtggtggcttagtttgcgcgctggttgtcggggcgctcgtagccgccgtggcgtcggccgcccctgcggctcctcgcgctagcggaggcgtagccgcaacagttgcggcgaacgggggtccagcctctcagcctcctcccgtcccgagccctgcgaccaccaaggctagaaagcggaagaccaagaaaccgcccaagcgccccgaggccaccccgccccccgatgccaacgcgactgtcgccgctggccatgcgacgcttcgcgctcatctgagggagatcaaggttgaaaatgctgatgcccaattttacgtgtgcccgcccccgacgggcgccacggttgtgcagtttgaacagccgcggcgctgtccgacgcggccagaaggccagaactatacggagggcatagcggtggtctttaaggaaaacatcgccccgtacaaatttaaggccacaatgtactacaaagacgtgacagtttcgcaagtgtggtttggccacagatactcgcagtttatgggaatcttcgaagatagagcccctgttcccttcgaggaagtcatcgacaagattaatgccaaaggggtatgccgttccacggccaaatacgtgcgcaacaatatggagaccaccgcctttcaccgggatgatcacgagaccgacatggagcttaagccggcgaaggtcgccacgcgtacctcccggggttggcacaccacagatcttaagtacaatccctcgcgagttgaagcattccatcggtatggaactaccgttaactgcatcgttgaggaggtggatgcgcggtcggtgtacccttacgatgagtttgtgttagcgaccggcgattttgtgtacatgtccccgttttacggctaccgggaggggtcgcacaccgaacatacctcgtacgccgctgacaggttcaagcaggtcgatggcttttacgcgcgcgatctcaccacgaaggcccgggccacgtcaccgacgaccaggaacttgctcacgacccccaagttcaccgtcgcttgggattgggtcccaaagcgtccggcggtctgcacgatgaccaaatggcaggaggtggacgaaatgctccgcgcagaatacggcggctccttccgcttctcgtccgacgccatctcgacaaccttcaccaccaatctgacccagtacagtctgtcgcgcgttgatttaggagactgcattggccgggatgcccgggaggccatcgacagaatgtttgcgcgtaagtacaatgccacacatattaaggtgggccagccgcaatactaccttgccacgggcggctttctcatcgcgtaccagccccttctctcaaatacgctcgctgaactgtacgtgcgggagtatatgagggaacaggaccgcaagccccgcaatgccacgcctgcgccactacgagaggcgccttcagctaatgcgtcggtggaacgtatcaagaccacctcctcaatagagttcgcccggctgcaatttacgtacaaccacatccagcgccacgtgaacgacatgctgggccgcatcgctgtcgcctggtgcgagctgcagaatcacgagctgactctttggaacgaggcccgaaaactcaaccccaacgcgatcgcctccgcaacagtcggtagacgggtgagcgctcgcatgctaggagatgtcatggctgtgtccacctgcgtgcccgtcgctccggacaacgtgattgtgcagaattcgatgcgggtcttgataataggctggagcctcggtggccatgcttcttgccccttgggcctccccccagcccctcctccccttcctgcacccgtacccccgtggtctttgaataaagtctgagtgggcggc

SEQ ID NO: 158 - DNA, 1654 bp, Human herpesvirus 2
  source 1..1654: mol_type = genomic DNA
tcaagcttttggaccctcgtacagaagctaatacgactcactatagggaaataagagagaaaagaagagtaagaagaaatataagagccaccatggcccttggacgggtaggcctagccgtgggcctgtggggcctactgtgggtgggtgtggtcgtggtgctggccaatgcctcccccggacgcacgataacggtgggcccgcgaggcaacgcgagcaatgctgccccctccgcgtccccgcggaacgcatccgccccccgaaccacacccacgcccccacaaccccgcaaagcgacgaaatccaaggcctccaccgccaaaccggctccgccccccaagaccggacccccgaagacatcctcggagcccgtgcgatgcaaccgccacgacccgctggcccggtacggctcgcgggtgcaaatccgatgccggtttcccaactccacgaggactgagtcccgtctccagatctggcgttatgccacggcgacggacgccgaaatcggaacagcgcctagcttagaagaggtgatggtgaacgtgtcggccccgcccgggggccaactggtgtatgacagtgcccccaaccgaacggacccgcatgtaatctgggcggagggcgccggcccgggcgccagcccgcgcctgtactcggttgtcggcccgctgggtcggcagcggctcatcatcgaagagttaaccctggagacacagggcatgtactattgggtgtggggccggacggaccgcccgtccgcctacgggacctgggtccgcgttcgagtatttcgccctccgtcgctgaccatccacccccacgcggtgctggagggccagccgtttaaggcgacgtgcacggccgcaacctactacccgggcaaccgcgcggagttcgtctggtttgaggacggtcgccgcgtattcgatccggcacagatacacacgcagacgcaggagaaccccgacggcttttccaccgtctccaccgtgacctccgcggccgtcggcgggcagggcccccctcgcaccttcacctgccagctgacgtggcaccgcgactccgtgtcgttctctcggcgcaacgccagcggcacggcctcggttctgccgcggccgaccattaccatggagtttacaggcgaccatgcggtctgcacggccggctgtgtgcccgagggggtcacgtttgcttggttcctgggggatgactcctcgccggcggaaaaggtggccgtcgcgtcccagacatcgtgcgggcgccccggcaccgccacgatccgctccaccctgccggtctcgtacgagcagaccgagtacatctgtagactggcgggatacccggacggaattccggtcctagagcaccacggaagccaccagcccccgccgcgggacccaaccgagcggcaggtgatccgggcggtggagggggcggggatcggagtggctgtccttgtcgcggtggttctggccgggaccgcggtagtgtacctgacccatgcctcctcggtacgctatcgtcggctgcggtaatgataataggctggagcctcggtggccatgcttcttgccccttgggcctccccccagcccctcctccccttcctgcacccgtacccccgtggtctttgaataaagtctgagtgggcggc

SEQ ID NO: 159 - DNA, 1393 bp, Human herpesvirus 2
  source 1..1393: mol_type = genomic DNA
tcaagcttttggaccctcgtacagaagctaatacgactcactatagggaaataagagagaaaagaagagtaagaagaaatataagagccaccatggggcgtttgacctccggcgtcgggacggcggccctgctagttgtcgcggtgggactccgcgtcgtctgcgccaaatacgccttagcagacccctcgcttaagatggccgatcccaatcgatttcgcgggaagaaccttccggttttggaccagctgaccgacccccccggggtgaagcgtgtttaccacattcagccgagcctggaggacccgttccagccccccagcatcccgatcactgtgtactacgcagtgctggaacgtgcctgccgcagcgtgctcctacatgccccatcggaggccccccagatcgtgcgcggggcttcggacgaggcccgaaagcacacgtacaacctgaccatcgcctggtatcgcatgggagacaattgcgctatccccatcacggttatggaatacaccgagtgcccctacaacaagtcgttgggggtctgccccatccgaacgcagccccgctggagctactatgacagctttagcgccgtcagcgaggataacctgggattcctgatgcacgcccccgccttcgagaccgcgggtacgtacctgcggctagtgaagataaacgactggacggagatcacacaatttatcctggagcaccgggcccgcgcctcctgcaagtacgctctccccctgcgcatccccccggcagcgtgcctcacctcgaaggcctaccaacagggcgtgacggtcgacagcatcgggatgctaccccgctttatccccgaaaaccagcgcaccgtcgccctatacagcttaaaaatcgccgggtggcacggccccaagcccccgtacaccagcaccctgctgccgccggagctgtccgacaccaccaacgccacgcaacccgaactcgttccggaagaccccgaggactcggccctcttagaggatcccgccgggacggtgtcttcgcagatccccccaaactggcacatcccgtcgatccaggacgtcgcaccgcaccacgcccccgccgcccccagcaacccgggcctgatcatcggcgcgctggccggcagtaccctggcggtgctggtcatcggcggtattgcgttttgggtacgccgccgcgctcagatggcccccaagcgcctacgtctcccccacatccgggatgacgacgcgcccccctcgcaccagccattgttttactagtgataataggctggagcctcggtggccatgcttcttgccccttgggcctccccccagcccctcctccccttcctgcacccgtacccccgtggtctttgaataaagtctgagtgggcggc

SEQ ID NO: 160 - DNA, 1858 bp, Human herpesvirus 2
  source 1..1858: mol_type = genomic DNA
tcaagcttttggaccctcgtacagaagctaatacgactcactatagggaaataagagagaaaagaagagtaagaagaaatataagagccaccatggctaggggggccgggttggttttttttgttggagtttgggtcgtaagctgcctcgcggcagcgcccagaacgtcctggaaacgcgtaacctcgggcgaagacgtggtgttactccccgcgccggcggggccggaagaacgcactcgggcccacaaactactgtgggcagcggaaccgctggatgcctgcggtcccctgaggccgtcatgggtggcactgtggcccccccgacgagtgcttgagacggttgtcgatgcggcgtgcatgcgcgccccggaaccgctcgctatcgcatacagtcccccgttccctgcgggcgacgagggactttattcggagttggcgtggcgcgatcgcgtagccgtggtcaacgagagtttagttatctacggggccctggagacggacagtggtctgtacaccctgtcagtggtgggcctatccgacgaggcccgccaagtggcgtccgtggttctcgtcgtcgagcccgcccctgtgcctaccccgacccccgatgactacgacgaggaggatgacgcgggcgtgagcgaacgcacgcccgtcagcgttccccccccaacacccccccgacgtccccccgtcgcccccccgacgcaccctcgtgttatccctgaggtgagccacgtgcggggggtgacggtccacatggaaaccccggaggccattctgtttgcgccaggggagacgtttgggacgaacgtctccatccacgcaattgcccacgacgacggtccgtacgccatggacgtcgtctggatgcgatttgatgtcccgtcctcgtgcgccgagatgcggatctatgaagcatgtctgtatcacccgcagctgcctgagtgtctgtctccggccgatgcgccgtgcgccgtaagttcgtgggcgtaccgcctggcggtccgcagctacgccggctgctccaggactacgcccccacctcgatgttttgctgaagctcgcatggaaccggtccccgggttggcgtggctcgcatcaactgttaatctggaattccagcatgcctctccccaacacgccggcctctatctgtgtgtggtgtatgtggacgaccatatccatgcctggggccacatgaccatctccacagcggcccagtaccggaatgcggtggtggaacagcatctcccccagcgccagcccgagcccgtagaacccacccgaccgcatgtgagagccccccctcccgcaccctccgcgagaggcccgttacgcttaggtgcggtcctgggggcggccctgttgctcgcggccctcgggctatccgcctgggcgtgcatgacctgctggcgcaggcgcagttggcgggcggttaaaagtcgggcctcggcgaccggccccacttacattcgagtagcggatagcgagctgtacgcggactggagttcggactcagagggcgagcgcgacggttccctgtggcaggaccctccggagagacccgactcaccgtccacaaatggatccggctttgagatcttatccccaacggcgccctctgtatacccccatagcgaagggcgtaaatcgcgccgcccgctcaccacctttggttcaggaagcccgggacgtcgtcactcccaggcgtcctattcttccgtcttatggtaatgataataggctggagcctcggtggccatgcttcttgccccttgggcctccccccagcccctcctccccttcctgcacccgtacccccgtggtctttgaataaagtctgagtgggcggc

SEQ ID NO: 161 - DNA, 1330 bp, Human herpesvirus 2
  source 1..1330: mol_type = genomic DNA
tcaagcttttggaccctcgtacagaagctaatacgactcactatagggaaataagagagaaaagaagagtaagaagaaatataagagccaccatgcccggccgctcgctgcagggcctggcgatcctgggcctgtgggtctgcgccaccggcctggtcgtccgcggccccacggtcagtctggtctcagactcactcgtggatgccggggccgtggggccccagggcttcgtggaagaggacctgcgtgttttcggggagcttcattttgtgggggcccaggtcccccacacaaactactacgacggcatcatcgagctgtttcactaccccctggggaaccactgcccccgcgttgtacacgtggtcacactgaccgcatgcccccgccgccccgccgtggcgttcaccttgtgtcgctcgacgcaccacgcccacagccccgcctatccgaccctggagctgggtctggcgcggcagccgcttctgcgggttcgaacggcaacgcgcgactatgccggtctgtatgtcctgcgcgtatgggtcggcagcgcgacgaacgccagcctgtttgttttgggggtggcgctctctgccaacgggacgtttgtgtataacggctcggactacggctcctgcgatccggcgcagcttcccttttcggccccgcgcctgggaccctcgagcgtatacacccccggagcctcccggcccacccctccacggacaacgacatcaccgtcctccccacgagacccgacccccgcccccggggacacagggacgcctgctcccgcgagcggcgagagagccccgcccaattccacgcgatcggccagcgaatcgagacacaggctaaccgtagcccaggtaatccagatcgccataccggcgtccatcatcgcctttgtgtttctgggcagctgtatctgcttcatccatagatgccagcgccgatacaggcgcccccgcggccagatttacaaccccgggggcgtttcctgcgcggtcaacgaggcggccatggcccgcctcggagccgagctgcgatcccacccaaacaccccccccaaaccccgacgccgttcgtcgtcgtccacgaccatgccttccctaacgtcgatagctgaggaatcggagccaggtccagtcgtgctgctgtccgtcagtcctcggccccgcagtggcccgacggccccccaagaggtctagtgataataggctggagcctcggtggccatgcttcttgccccttgggcctccccccagcccctcctccccttcctgcacccgtacccccgtggtctttgaataaagtctgagtgggcggc

SEQ ID NO: 162 - DNA, 2515 bp, Human herpesvirus 2
  source 1..2515: mol_type = genomic DNA
tcaagcttttggaccctcgtacagaagctaatacgactcactatagggaaataagagagaaaagaagagtaagaagaaatataagagccaccatgcgcggggggggcttagtttgcgcgctggtcgtgggggcgctcgtagccgcggtcgcgtcggcggctccggctgccccacgcgcttcaggtggtgtcgctgcgaccgttgcggcgaatggtggtcccgccagccaaccgcctcccgtcccgagccccgcgaccactaaggcccggaagcggaagaccaagaagccacccaagcggcccgaggcgactccgcccccagacgccaacgcgaccgtcgccgccggccacgccactctgcgtgcgcacctgcgggaaatcaaggtcgagaacgcggacgcccagttttacgtgtgcccgccgccgactggcgccacggtggtgcagtttgagcaacctaggcgctgcccgacgcgaccagaggggcagaactacaccgagggcatagcggtggtctttaaggaaaacatcgccccgtacaaattcaaggccaccatgtactacaaagacgtgaccgtgtcgcaggtgtggttcggccaccgctactcccagtttatggggatattcgaggaccgcgcccccgttcccttcgaagaggtgattgacaaaattaacgccaagggggtctgccgcagtacggcgaagtacgtccggaacaacatggagaccactgccttccaccgggacgaccacgaaacagacatggagctcaaaccggcgaaagtcgccacgcgcacgagccgggggtggcacaccaccgacctcaaatacaatccttcgcgggtggaagcattccatcggtatggcacgaccgtcaactgtatcgtagaggaggtggatgcgcggtcggtgtacccctacgatgagttcgtgctggcaacgggcgattttgtgtacatgtcccctttttacggctaccgggaaggtagtcacaccgagcacaccagttacgccgccgaccgctttaagcaagtggacggcttctacgcgcgcgacctcaccacaaaggcccgggccacgtcgccgacgacccgcaatttgctgacgacccccaagtttaccgtggcctgggactgggtgcctaagcgaccggcggtctgtaccatgacaaagtggcaggaggtggacgaaatgctccgcgctgaatacggtggctctttccgcttctcttccgacgccatctccaccacgttcaccaccaacctgacccaatactcgctctcgagagtcgatctgggagactgcattggccgggatgcccgcgaggcaattgaccgcatgttcgcgcgcaagtacaacgctacgcacataaaggttggccaaccccagtactacctagccacggggggcttcctcatcgcttatcaacccctcctcagcaacacgctcgccgagctgtacgtgcgggaatatatgcgggaacaggaccgcaaaccccgaaacgccacgcccgcgccgctgcgggaagcaccgagcgccaacgcgtccgtggagcgcatcaagacgacatcctcgattgagtttgctcgtctgcagtttacgtataaccacatacagcgccatgtaaacgacatgctcgggcgcatcgccgtcgcgtggtgcgagctccaaaatcacgagctcactctgtggaacgaggcacgcaagctcaatcccaacgccatcgcatccgccaccgtaggccggcgggtgagcgctcgcatgctcggggatgtcatggccgtctccacgtgcgtgcccgtcgccccggacaacgtgatcgtgcaaaatagcatgcgcgtttcttcgcggccggggacgtgctacagccgcccgctggttagctttcggtacgaagaccaaggcccgctgattgaggggcagctgggtgagaacaacgagctgcgcctcacccgcgatgcgttagagccgtgtaccgtcggccaccggcgctacttcatcttcggagggggatacgtatacttcgaagaatatgcgtactctcaccaattgagtcgcgccgatgtcaccactgttagcaccttcatcgacctgaacatcaccatgctggaggaccacgagttcgtgcccctggaggtctacacacgccacgagatcaaggattccggcctactggactacaccgaagtccagagacgaaatcagctgcacgatctccgctttgctgacatcgatactgttatccgcgccgacgccaacgccgccatgttcgcaggtctgtgtgcgtttttcgagggtatgggtgacttagggcgcgcggtgggcaaggtcgtcatgggggtagtcgggggcgtggtgtcggccgtctcgggcgtctcctcctttatgtctaacccctgataataggctggagcctcggtggccatgcttcttgccccttgggcctccccccagcccctcctccccttcctgcacccgtacccccgtggtctttgaataaagtctgagtgggcggc

SEQ ID NO: 163 - DNA, 1552 bp, Human herpesvirus 2
  source 1..1552: mol_type = genomic DNA
tcaagcttttggaccctcgtacagaagctaatacgactcactatagggaaataagagagaaaagaagagtaagaagaaatataagagccaccatggcccttggacgggtgggcctagccgtgggcctgtggggcctgctgtgggtgggtgttgtcgtggtgctggccaatgcctcccctggacgcacgataacggtgggcccgcgggggaacgcgagcaatgccgccccatccgcgtccccgcggaacgcatccgccccccgaaccacacccactcccccccaaccccgcaaagcgacgaaaagtaaggcctccaccgccaaaccggccccgccccccaagaccgggcccccgaagacatcttctgagcccgtgcgctgcaaccgccacgacccgctggcccggtacggctcgcgggtgcaaatccgatgtcgatttcccaactccactcgcacggaatcccgcctccagatctggcgttatgccacggcgacggacgccgagattggaactgcgcctagcttagaggaggtgatggtaaacgtgtcggccccgcccgggggccaactggtgtatgatagcgcacctaaccgaacggacccgcacgtgatttgggcggagggcgccggacctggcgcctcaccgcggctgtactcggtcgtcgggccgctgggtcggcagagacttatcatcgaagagctgaccctcgagacacagggcatgtattattgggtgtggggccggacggaccgcccgtccgcgtacgggacctgggtgcgcgttcgcgtgttccgccctccttcgctgaccatccacccccacgcggtgctggagggccagccgtttaaagcgacgtgcaccgccgccacctactacccgggcaaccgcgcggagttcgtctggttcgaggacggtcgccgggtattcgatccggcccagatacatacgcagacgcaggaaaaccccgacggcttttccaccgtctccaccgtgacctccgcggccgtcggcggccagggccccccgcgcaccttcacctgtcagctgacgtggcaccgcgactccgtgtcgttctctcggcgcaatgccagcggcacggcatcggtgctgccacggccaaccattaccatggagtttacgggcgaccatgcggtctgcacggccggctgtgtgcccgagggggtgacgtttgcctggttcctgggggacgactcctcgccggccgagaaggtggccgtcgcgtcccagacctcgtgcggtcgccccggcaccgccacgatccgctccacactgccggtctcgtacgagcagaccgagtacatctgccggctggcgggatacccggacggaattccggtcctagagcaccatggcagccaccagcccccgccgcgggaccccaccgaacggcaggtgattcgggcagtggaagggtgataataggctggagcctcggtggccatgcttcttgccccttgggcctccccccagcccctcctccccttcctgcacccgtacccccgtggtctttgaataaagtctgagtgggcggc

SEQ ID NO: 164 - DNA, 1462 bp, Human herpesvirus 2
  source 1..1462: mol_type = genomic DNA
tcaagcttttggaccctcgtacagaagctaatacgactcactatagggaaataagagagaaaagaagagtaagaagaaatataagagccaccatggctcgcggggccgggttggtgttttttgttggagtttgggtcgtatcgtgcctggcggcagcacccagaacgtcctggaaacgggttacctcgggcgaggacgtggtgttgcttccggcgcccgcggggccggaggaacgcacacgggcccacaaactactgtgggccgcggaacccctggatgcctgcggtcccctgaggccgtcgtgggtggcgctgtggcccccgcgacgggtgctcgaaacggtcgtggatgcggcgtgcatgcgcgccccggaaccgctcgccatagcatacagtcccccgttccccgcgggcgacgagggactgtattcggagttggcgtggcgcgatcgcgtagccgtggtcaacgagagtctggtcatctacggggccctggagacggacagcggtctgtacaccctgtccgtggtcggcctaagcgacgaggcgcgccaagtggcgtcggtggttctggtcgtggagcccgcccctgtgccgaccccgacccccgacgactacgacgaagaagacgacgcgggcgtgagcgaacgcacgccggtcagcgtaccccccccgaccccaccccgtcgtccccccgtcgccccccctacgcaccctcgtgttatccccgaggtgtcccacgtgcgcggggtaacggtccatatggagaccccggaggccattctgtttgcccccggagagacgtttgggacgaacgtctccatccacgccattgcccatgacgacggtccgtacgccatggacgtcgtctggatgcggtttgacgtgccgtcctcgtgcgccgagatgcggatctacgaagcttgtctgtatcacccgcagcttccagaatgtctatctccggccgacgcgccgtgcgctgtaagttcctgggcgtaccgcctggcggtccgcagctacgccggctgttccaggactacgcccccgccgcgatgttttgccgaggctcgcatggaaccggtcccggggttggcgtggttagcctccaccgtcaacctggaattccagcacgcctcccctcagcacgccggcctttacctgtgcgtggtgtacgtggacgatcatatccacgcctggggccacatgaccatctctaccgcggcgcagtaccggaacgcggtggtggaacagcacttgccccagcgccagcctgaacccgtcgagcccacccgcccgcacgtaagagcaccccctcccgcgccttccgcgcgcggcccgctgcgctgataataggctggagcctcggtggccatgcttcttgccccttgggcctccccccagcccctcctccccttcctgcacccgtacccccgtggtctttgaataaagtctgagtgggcggc

SEQ ID NO: 165 - DNA, 4096 bp, Human herpesvirus 2
  source 1..4096: mol_type = genomic DNA
tcaagcttttggaccctcgtacagaagctaatacgactcactatagggaaataagagagaaaagaagagtaagaagaaatataagagccaccatgtcggcggagcagcggaagaagaagaagacgacgacgacgacgcagggccgcggggccgaggtcgcgatggcggacgaggacgggggacgtctccgggccgcggcggagacgaccggcggccccggatctccggatccagccgacggaccgccgcccaccccgaacccggaccgtcgccccgccgcgcggcccgggttcgggtggcacggtgggccggaggagaacgaagacgaggccgacgacgccgccgccgatgccgatgccgacgaggcggccccggcgtccggggaggccgtcgacgagcctgccgcggacggcgtcgtctcgccgcggcagctggccctgctggcctcgatggtggacgaggccgttcgcacgatcccgtcgccccccccggagcgcgacggcgcgcaagaagaagcggcccgctcgccttctccgccgcggaccccctccatgcgcgccgattatggcgaggagaacgacgacgacgacgacgacgacgatgacgacgaccgcgacgcgggccgctgggtccgcggaccggagacgacgtccgcggtccgcggggcgtacccggaccccatggccagcctgtcgccgcgacccccggcgccccgccgacaccaccaccaccaccaccaccgccgccggcgcgccccccgccggcgctcggccgcctctgactcatcaaaatccggatcctcgtcgtcggcgtcctccgcctcctcctccgcctcctcctcctcgtctgcatccgcctcctcgtctgacgacgacgacgacgacgacgccgcccgcgcccccgccagcgccgcagaccacgccgcgggcgggaccctcggcgcggacgacgaggaggcgggggtgcccgcgagggccccgggggcggcgccccggccgagcccgcccagggccgagcccgccccggcccggacccccgcggcgaccgcgggccgcctggagcgccgccgggcccgcgcggcggtggccggccgcgacgccacgggccgcttcacggccgggcggccccggcgggtcgagctggacgccgacgcggcctccggcgccttctacgcgcgctaccgcgacgggtacgtcagcggggagccgtggcccggggccggccccccgcccccggggcgcgtgctgtacggcgggctgggcgacagccgccccggcctctggggggcgcccgaggcggaggaggcgcgggcccggttcgaggcctcgggcgccccggcgcccgtgtgggcgcccgagctgggcgacgcggcgcagcagtacgccctgatcacgcggctgctgtacacgccggacgcggaggcgatggggtggctccagaacccgcgcgtggcgcccggggacgtggcgctggaccaggcctgcttccggatctcgggcgcggcgcgcaacagcagctccttcatctccggcagcgtggcgcgggccgtgccccacctggggtacgccatggcggcgggccgcttcggctggggcctggcgcacgtggcggccgccgtggccatgagccgccgctacgaccgcgcgcagaagggcttcctgctgaccagcctgcgccgcgcctacgcgcccctgctggcgcgcgagaacgcggcgctgaccggggcgcgaacccccgacgacggcggcgacgccaaccgccacgacggcgacgacgcccgcgggaagcccgccgccgccgccgccccgttgccgtcggcggcggcgtcgccggccgacgagcgcgcggtgcccgccggctacggcgccgcgggggtgctcgccgccctggggcgcctgagcgccgcgcccgcctccgcgccggccggggccgacgacgacgacgacgacgacggcgccggcggtggtggcggcggccggcgcgcggaggcgggccgcgtggccgtggagtgcctggccgcctgccgcgggatcctggaggcgctggcggagggcttcgacggcgacctggcggccgtgccggggctggccggagcccggcccgccgcgcccccgcgcccggggcccgcgggcgcggccgccccgccgcacgccgacgcgccccgcctgcgcgcctggctgcgcgagctgcggttcgtgcgcgacgcgctggtgctgatgcgcctgcgcggggacctgcgcgtggccggcggcagcgaggccgccgtggccgccgtgcgcgccgtgagcctggtcgccggggccctgggcccggcgctgccgcggagcccgcgcctgctgagctccgccgccgccgccgccgcggacctgctcttccagaaccagagcctgcgccccctgctggccgacaccgtcgccgcggccgactcgctcgccgcgcccgcctccgcgccgcgggaggccgcggacgccccccgccccgcggccgcccctcccgcgggggccgcgccccccgccccgccgacgccgccgccgcggccgccgcgccccgcggcgctgacccgccggcccgccgagggccccgacccgcagggcggctggcgccgccagccgccggggcccagccacacgccggcgccctcggccgccgccctggaggcctactgcgccccgcgggccgtggccgagctcacggaccacccgctcttccccgcgccgtggcgcccggccctcatgttcgacccgcgcgcgctggcctcgctggccgcgcgctgcgccgccccgccccccggcggcgcgcccgccgccttcggcccgctgcgcgcctcgggcccgctgcgccgcgcggcggcctggatgcgccaggtgcccgacccggaggacgtgcgcgtggtgatcctctactcgccgctgccgggcgaggacctggccgcgggccgcgccgggggcgggccccccccggagtggtccgccgagcgcggcgggctgtcctgcctgctggcggccctgggcaaccggctctgcgggcccgccacggccgcctgggcgggcaactggaccggcgcccccgacgtctcggcgctgggcgcgcagggcgtgctgctgctgtccacgcgggacctggccttcgccggcgccgtggagttcctggggctgctggccggcgcctgcgaccgccgcctcatcgtcgtcaacgccgtgcgcgccgcggcctggcccgccgctgcccccgtggtctcgcggcagcacgcctacctggcctgcgaggtgctgcccgccgtgcagtgcgccgtgcgctggccggcggcgcgggacctgcgccgcaccgtgctggcctccggccgcgtgttcgggccgggggtcttcgcgcgcgtggaggccgcgcacgcgcgcctgtaccccgacgcgccgccgctgcgcctctgccgcggggccaacgtgcggtaccgcgtgcgcacgcgcttcggccccgacacgctggtgcccatgtccccgcgcgagtaccgccgcgccgtgctcccggcgctggacggccgggccgccgcctcgggcgcgggcgacgccatggcgcccggcgcgccggacttctgcgaggacgaggcgcactcgcaccgcgcctgcgcgcgctggggcctgggcgcgccgctgcggcccgtctacgtggcgctggggcgcgacgccgtgcgcggcggcccggcggagctgcgcgggccgcggcgggagttctgcgcgcgggcgctgctcgagcccgacggcgacgcgcccccgctggtgctgcgcgacgacgcggacgcgggcccgcccccgcagatacgctgggcgtcggccgcgggccgcgcggggacggtgctggccgcggcgggcggcggcgtggaggtggtggggaccgccgcggggctggccacgccgccgaggcgcgagcccgtggacatggacgcggagctggaggacgacgacgacggactgtttggggagtgatgataataggctggagcctcggtggccatgcttcttgccccttgggcctccccccagcccctcctccccttcctgcacccgtacccccgtggtctttgaataaagtctgagtgggcggc

SEQ ID NO: 166 - DNA, 997 bp, Human herpesvirus 2
  source 1..997: mol_type = genomic DNA
tcaagcttttggaccctcgtacagaagctaatacgactcactatagggaaataagagagaaaagaagagtaagaagaaatataagagccaccatgcccggccgctcgctgcagggcctggcgatcctgggcctgtgggtctgcgccaccggcctggtcgtccgcggccccacggtcagtctggtctcagactcactcgtggatgccggggccgtggggccccagggcttcgtggaagaggacctgcgtgttttcggggagcttcattttgtgggggcccaggtcccccacacaaactactacgacggcatcatcgagctgtttcactaccccctggggaaccactgcccccgcgttgtacacgtggtcacactgaccgcatgcccccgccgccccgccgtggcgttcaccttgtgtcgctcgacgcaccacgcccacagccccgcctatccgaccctggagctgggtctggcgcggcagccgcttctgcgggttcgaacggcaacgcgcgactatgccggtctgtatgtcctgcgcgtatgggtcggcagcgcgacgaacgccagcctgtttgttttgggggtggcgctctctgccaacgggacgtttgtgtataacggctcggactacggctcctgcgatccggcgcagcttcccttttcggccccgcgcctgggaccctcgagcgtatacacccccggagcctcccggcccacccctccacggacaacgacatccccgtcctcccctagagacccgacccccgcccccggggacacaggaacgcctgcgcccgcgagcggcgagagagccccgcccaattccacgcgatcggccagcgaatcgagacacaggctaaccgtagcccaggtaatccagtgataataggctggagcctcggtggccatgcttcttgccccttgggcctccccccagcccctcctccccttcctgcacccgtacccccgtggtctttgaataaagtctgagtgggcggc

SEQ ID NO: 167 - DNA, 1228 bp, Human herpesvirus 2
  source 1..1228: mol_type = genomic DNA
tcaagcttttggaccctcgtacagaagctaatacgactcactatagggaaataagagagaaaagaagagtaagaagaaatataagagccaccatggggcgtttgacctccggcgtcgggacggcggccctgctagttgtcgcggtgggactccgcgtcgtctgcgccaaatacgccttagcagacccctcgcttaagatggccgatcccaatcgatttcgcgggaagaaccttccggttttggaccagctgaccgacccccccggggtgaagcgtgtttaccacattcagccgagcctggaggacccgttccagccccccagcatcccgatcactgtgtactacgcagtgctggaacgtgcctgccgcagcgtgctcctacatgccccatcggaggccccccagatcgtgcgcggggcttcggacgaggcccgaaagcacacgtacaacctgaccatcgcctggtatcgcatgggagacaattgcgctatccccatcacggttatggaatacaccgagtgcccctacaacaagtcgttgggggtctgccccatccgaacgcagccccgctggagctactatgacagctttagcgccgtcagcgaggataacctgggattcctgatgcacgcccccgccttcgagaccgcgggtacgtacctgcggctagtgaagataaacgactggacggagatcacacaatttatcctggagcaccgggcccgcgcctcctgcaagtacgctctccccctgcgcatccccccggcagcgtgcctcacctcgaaggcctaccaacagggcgtgacggtcgacagcatcgggatgctaccccgctttatccccgaaaaccagcgcaccgtcgccctatacagcttaaaaatcgccgggtggcacggccccaagcccccgtacaccagcaccctgctgccgccggagctgtccgacaccaccaacgccacgcaacccgaactcgttccggaagaccccgaggactcggccctcttagaggatcccgccgggacggtgtcttcgcagatccccccaaactggcacatcccgtcgatccaggacgtcgcgccgcaccacgcccccgccgcccccagcaacccgtgataataggctggagcctcggtggccatgcttcttgccccttgggcctccccccagcccctcctccccttcctgcacccgtacccccgtggtctttgaataaagtctgagtgggcggc

SEQ ID NO: 168 - DNA, 2706 bp, Human herpesvirus 2
  source 1..2706: mol_type = genomic DNA
atgcgcggggggggcttggtttgcgcgctggtcgtgggggcgctggtggccgcggtggcgtcggcggccccggcggccccccgcgcctcgggcggcgtggccgcgaccgtcgcggcgaacgggggtcccgcctcccagccgccccccgtcccgagccccgcgaccaccaaggcccggaagcggaaaaccaaaaagccgcccaagcggcccgaggcgaccccgccccccgacgccaacgcgaccgtcgccgccggccacgccacgctgcgcgcgcacctgcgggaaatcaaggtcgagaacgccgatgcccagttttacgtgtgcccgcccccgacgggcgccacggtggtgcagtttgagcagccgcgccgctgcccgacgcgcccggaggggcagaactacacggagggcatcgcggtggtcttcaaggagaacatcgccccgtacaaattcaaggccaccatgtactacaaagacgtgaccgtgtcgcaggtgtggttcggccaccgctactcccagtttatggggatattcgaggaccgcgcccccgttcccttcgaggaggtgatcgacaagattaacgccaagggggtctgccgctccacggccaagtacgtgcggaacaacatggagaccaccgcgtttcaccgggacgaccacgagaccgacatggagctcaagccggcgaaggtcgccacgcgcacgagccgggggtggcacaccaccgacctcaagtacaacccctcgcgggtggaggcgttccatcggtacggcacgacggtcaactgcatcgtcgaggaggtggacgcgcggtcggtgtacccgtacgatgagtttgtgctggcgacgggcgactttgtgtacatgtccccgttttacggctaccgggaggggtcgcacaccgagcacaccagctacgccgccgaccgcttcaagcaggtcgacggcttctacgcgcgcgacctcaccacgaaggcccgggccacgtcgccgacgacccgcaacttgctgacgacccccaagtttaccgtggcctgggactgggtgccgaagcgaccggcggtctgcaccatgaccaagtggcaggaggtggacgagatgctccgcgccgagtacggcggctccttccgcttctcctccgacgccatctcgaccaccttcaccaccaacctgacccagtactcgctctcgcgcgtcgacctgggcgactgcatcggccgggatgcccgcgaggccatcgaccgcatgtttgcgcgcaagtacaacgccacgcacatcaaggtgggccagccgcagtactacctggccacggggggcttcctcatcgcgtaccagcccctcctcagcaacacgctcgccgagctgtacgtgcgggagtacatgcgggagcaggaccgcaagccccggaatgccacgcccgcgccactgcgggaggcgcccagcgccaacgcgtccgtggagcgcatcaagaccacctcctcgatcgagttcgcccggctgcagtttacgtataaccacatacagcgccacgtgaacgacatgctggggcgcatcgccgtcgcgtggtgcgagctgcagaaccacgagctgactctctggaacgaggcccgcaagctcaaccccaacgccatcgcctccgccaccgtcggccggcgggtgagcgcgcgcatgctcggagacgtcatggccgtctccacgtgcgtgcccgtcgccccggacaacgtgatcgtgcagaactcgatgcgcgtcagctcgcggccggggacgtgctacagccgccccctggtcagctttcggtacgaagaccagggcccgctgatcgaggggcagctgggcgagaacaacgagctgcgcctcacccgcgacgcgctcgagccgtgcaccgtgggccaccggcgctacttcatcttcggcgggggctacgtgtacttcgaggagtacgcgtactctcaccagctgagtcgcgccgacgtcaccaccgtcagcaccttcatcgacctgaacatcaccatgctggaggaccacgagtttgtgcccctggaggtctacacgcgccacgagatcaaggacagcggcctgctggactacacggaggtccagcgccgcaaccagctgcacgacctgcgctttgccgacatcgacacggtcatccgcgccgacgccaacgccgccatgttcgcggggctgtgcgcgttcttcgaggggatgggggacttggggcgcgcggtcggcaaggtcgtcatgggagtagtggggggcgtggtgtcggccgtctcgggcgtgtcctcctttatgtccaaccccttcggggcgcttgccgtggggctgctggtcctggccggcctggtcgcggccttcttcgccttccgctacgtcctgcaactgcaacgcaatcccatgaaggccctgtatccgctcaccaccaaggaactcaagacttccgaccccgggggcgtgggcggggagggggaggaaggcgcggaggggggcgggtttgacgaggccaagttggccgaggcccgagaaatgatccgatatatggctttggtgtcggccatggagcgcacggaacacaaggccagaaagaagggcacgagcgccctgctcagctccaaggtcaccaacatggttctgcgcaagcgcaacaaagccaggtactctccgctccacaacgaggacgaggccggagacgaagacgagctctaa

SEQ ID NO: 169 - DNA, 1443 bp, Human herpesvirus 2
  source 1..1443: mol_type = genomic DNA
atggcccttggacgggtgggcctagccgtgggcctgtggggcctgctgtgggtgggtgtggtcgtggtgctggccaatgcctcccccggacgcacgataacggtgggcccgcgggggaacgcgagcaatgccgccccctccgcgtccccgcggaacgcatccgccccccgaaccacacccacgcccccccaaccccgcaaggcgacgaaaagtaaggcctccaccgccaaaccggccccgccccccaagaccgggcccccgaagacatcctcggagcccgtgcgatgcaaccgccacgacccgctggcccggtacggctcgcgggtgcaaatccgatgccggtttcccaactccacccgcacggagtcccgcctccagatctggcgttatgccacggcgacggacgccgagatcggaacggcgcctagcttagaggaggtgatggtaaacgtgtcggccccgcccgggggccaactggtgtatgacagcgcccccaaccgaacggacccgcacgtgatctgggcggagggcgccggcccgggcgccagcccgcggctgtactcggtcgtcgggccgctgggtcggcagcggctcatcatcgaagagctgaccctggagacccagggcatgtactactgggtgtggggccggacggaccgcccgtccgcgtacgggacctgggtgcgcgttcgcgtgttccgccctccgtcgctgaccatccacccccacgcggtgctggagggccagccgtttaaggcgacgtgcacggccgccacctactacccgggcaaccgcgcggagttcgtctggttcgaggacggtcgccgggtattcgatccggcccagatacacacgcagacgcaggagaaccccgacggcttttccaccgtctccaccgtgacctccgcggccgtcggcggccagggccccccgcgcaccttcacctgccagctgacgtggcaccgcgactccgtgtcgttctctcggcgcaacgccagcggcacggcatcggtgctgccgcggccaaccattaccatggagtttacgggcgaccatgcggtctgcacggccggctgtgtgcccgagggggtgacgtttgcctggttcctgggggacgactcctcgccggcggagaaggtggccgtcgcgtcccagacatcgtgcgggcgccccggcaccgccacgatccgctccaccctgccggtctcgtacgagcagaccgagtacatctgccggctggcgggatacccggacggaattccggtcctagagcaccacggcagccaccagcccccgccgcgggaccccaccgagcggcaggtgatccgggcggtggagggggcggggatcggagtggctgtccttgtcgcggtggttctggccgggaccgcggtagtgtacctcacccacgcctcctcggtgcgctatcgtcggctgcggtaa

SEQ ID NO: 170 - DNA, 1182 bp, Human herpesvirus 2
  source 1..1182: mol_type = genomic DNA
atggggcgtttgacctccggcgtcgggacggcggccctgctagttgtcgcggtgggactccgcgtcgtctgcgccaaatacgccttagcagacccctcgcttaagatggccgatcccaatcgatttcgcgggaagaaccttccggttttggaccagctgaccgacccccccggggtgaagcgtgtttaccacattcagccgagcctggaggacccgttccagccccccagcatcccgatcactgtgtactacgcagtgctggaacgtgcctgccgcagcgtgctcctacatgccccatcggaggccccccagatcgtgcgcggggcttcggacgaggcccgaaagcacacgtacaacctgaccatcgcctggtatcgcatgggagacaattgcgctatccccatcacggttatggaatacaccgagtgcccctacaacaagtcgttgggggtctgccccatccgaacgcagccccgctggagctactatgacagctttagcgccgtcagcgaggataacctgggattcctgatgcacgcccccgccttcgagaccgcgggtacgtacctgcggctagtgaagataaacgactggacggagatcacacaatttatcctggagcaccgggcccgcgcctcctgcaagtacgctctccccctgcgcatccccccggcagcgtgcctcacctcgaaggcctaccaacagggcgtgacggtcgacagcatcgggatgctaccccgctttatccccgaaaaccagcgcaccgtcgccctatacagcttaaaaatcgccgggtggcacggccccaagcccccgtacaccagcaccctgctgccgccggagctgtccgacaccaccaacgccacgcaacccgaactcgttccggaagaccccgaggactcggccctcttagaggatcccgccgggacggtgtcttcgcagatccccccaaactggcacatcccgtcgatccaggacgtcgcgccgcaccacgcccccgccgcccccagcaacccgggcctgatcatcggcgcgctggccggcagtaccctggcggtgctggtcatcggcggtattgcgttttgggtacgccgccgcgctcagatggcccccaagcgcctacgtctcccccacatccgggatgacgacgcgcccccctcgcaccagccattgttttactag

SEQ ID NO: 171 - DNA, 1647 bp, Human herpesvirus 2
  source 1..1647: mol_type = genomic DNA
atggctcgcggggccgggttggtgttttttgttggagtttgggtcgtatcgtgcctggcggcagcacccagaacgtcctggaaacgggtaacctcgggcgaggacgtggtgttgcttccggcgcccgcggggccggaggaacgcacccgggcccacaaactactgtgggccgcggaacccctggatgcctgcggtcccctgcgcccgtcgtgggtggcgctgtggcccccccgacgggtgctcgagacggtcgtggatgcggcgtgcatgcgcgccccggaaccgctcgccatagcatacagtcccccgttccccgcgggcgacgagggactgtattcggagttggcgtggcgcgatcgcgtagccgtggtcaacgagagtctggtcatctacggggccctggagacggacagcggtctgtacaccctgtccgtggtcggcctaagcgacgaggcgcgccaagtggcgtcggtggttctggtcgtggagcccgcccctgtgccgaccccgacccccgacgactacgacgaagaagacgacgcgggcgtgagcgaacgcacgccggtcagcgttccccccccaacccccccccgtcgtccccccgtcgcccccccgacgcaccctcgtgttatccccgaggtgtcccacgtgcgcggggtaacggtccatatggagaccccggaggccattctgtttgcccccggggagacgtttgggacgaacgtctccatccacgccattgcccacgacgacggtccgtacgccatggacgtcgtctggatgcggtttgacgtgccgtcctcgtgcgccgagatgcggatctacgaagcttgtctgtatcacccgcagcttccagagtgtctatctccggccgacgcgccgtgcgccgtaagttcctgggcgtaccgcctggcggtccgcagctacgccggctgttccaggactacgcccccgccgcgatgttttgccgaggctcgcatggaaccggtcccggggttggcgtggctggcctccaccgtcaatctggaattccagcacgcctccccccagcacgccggcctctacctgtgcgtggtgtacgtggacgatcatatccacgcctggggccacatgaccatcagcaccgcggcgcagtaccggaacgcggtggtggaacagcacctcccccagcgccagcccgagcccgtcgagcccacccgcccgcacgtgagagccccccctcccgcgccctccgcgcgcggcccgctgcgcctcggggcggtgctgggggcggccctgttgctggccgccctcgggctgtccgcgtgggcgtgcatgacctgctggcgcaggcgctcctggcgggcggttaaaagccgggcctcggcgacgggccccacttacattcgcgtggcggacagcgagctgtacgcggactggagttcggacagcgagggggagcgcgacgggtccctgtggcaggaccctccggagagacccgactctccctccacaaatggatccggctttgagatcttatcaccaacggctccgtctgtatacccccatagcgaggggcgtaaatctcgccgcccgctcaccacctttggttcgggaagcccgggccgtcgtcactcccaggcctcctattcgtccgtcctctggtaa

SEQ ID NO: 172 - DNA, 1119 bp, Human herpesvirus 2
  source 1..1119: mol_type = genomic DNA
atgcccggccgctcgctgcagggcctggcgatcctgggcctgtgggtctgcgccaccggcctggtcgtccgcggccccacggtcagtctggtctcagactcactcgtggatgccggggccgtggggccccagggcttcgtggaagaggacctgcgtgttttcggggagcttcattttgtgggggcccaggtcccccacacaaactactacgacggcatcatcgagctgtttcactaccccctggggaaccactgcccccgcgttgtacacgtggtcacactgaccgcatgcccccgccgccccgccgtggcgttcaccttgtgtcgctcgacgcaccacgcccacagccccgcctatccgaccctggagctgggtctggcgcggcagccgcttctgcgggttcgaacggcaacgcgcgactatgccggtctgtatgtcctgcgcgtatgggtcggcagcgcgacgaacgccagcctgtttgttttgggggtggcgctctctgccaacgggacgtttgtgtataacggctcggactacggctcctgcgatccggcgcagcttcccttttcggccccgcgcctgggaccctcgagcgtatacacccccggagcctcccggcccacccctccacggacaacgacatccccgtcctccccccgagacccgacccccgcccccggggacacagggacgcccgcgcccgcgagcggcgagagagccccgcccaattccacgcgatcggccagcgaatcgagacacaggctaaccgtagcccaggtaatccagatcgccataccggcgtccatcatcgcctttgtgtttctgggcagctgtatctgcttcatccatagatgccagcgccgatacaggcgcccccgcggccagatttacaaccccgggggcgtttcctgcgcggtcaacgaggcggccatggcccgcctcggagccgagctgcgatcccacccaaacaccccccccaaaccccgacgccgttcgtcgtcgtccacgaccatgccttccctaacgtcgatagctgaggaatcggagccaggtccagtcgtgctgctgtccgtcagtcctcggccccgcagtggcccgacggccccccaagaggtctag

SEQ ID NO: 173 - DNA, 2262 bp, synthetic construct
  misc_feature 1..2262: note = Synthetic Polynucleotide
  source 1..2262: mol_type = other DNA
atggaaccccggcccggcacgagctcccgggcggaccccggccccgagcggccgccgcggcagacccccggcacgcagcccgccgccccgcacgcctgggggatgctcaacgacatgcagtggctcgccagcagcgactcggaggaggagaccgaggtgggaatctctgacgacgaccttcaccgcgactccacctccgaggcgggcagcacggacacggagatgttcgaggcgggcctgatggacgcggccacgcccccggcccggcccccggccgagcgccagggcagccccacgcccgccgacgcgcagggatcctgtgggggtgggcccgtgggtgaggaggaagcggaagcgggaggggggggcgacgtgaacaccccggtggcgtacctgatagtgggcgtgaccgccagcgggtcgttcagcaccatcccgatagtgaacgacccccggacccgcgtggaggccgaggcggccgtgcgggccggcacggccgtggactttatctggacgggcaacccgcggacggccccgcgctccctgtcgctggggggacacacggtccgcgccctgtcgcccacccccccgtggcccggcacggacgacgaggacgatgacctggccgacgtggactacgtcccgcccgccccccgaagagcgccccggcgcgggggcggcggtgcgggggcgacccgcggaacctcccagcccgccgcgacccgaccggcgccccctggcgccccgcggagcagcagcagcggcggcgccccgttgcgggcgggggtgggatctgggtctgggggcggccctgccgtcgcggccgtcgtgccgagagtggcctctcttccccctgcggccggcggggggcgcgcgcaggcgcggcgggtgggcgaagacgccgcggcggcggagggcaggacgccccccgcgagacagccccgcgcggcccaggagccccccatagtcatcagcgactctcccccgccgtctccgcgccgccccgcgggccccgggccgctctcctttgtctcctcctcctccgcacaggtgtcctcgggccccggggggggaggtctgccacagtcgtcggggcgcgccgcgcgcccccgcgcggccgtcgccccgcgcgtccggagtccgccccgcgccgccgccgcccccgtggtgtctgcgagcgcggacgcggccgggcccgcgccgcccgccgtgccggtggacgcgcaccgcgcgccccggtcgcgcatgacccaggctcagaccgacacccaagcacagagtctgggccgggcaggcgcgaccgacgcgcgcgggtcgggagggccgggcgcggagggaggatcgggccccgcggcctcgtcctccgcctcttcctccgccgccccgcgctcgcccctcgccccccagggggtgggggccaagagggcggcgccgcgccgggccccggactcggactcgggcgaccgcggccacgggccgctcgccccggcgtccgcgggcgccgcgcccccgtcggcgtctccgtcgtcccaggccgcggtcgccgccgcctcctcctcctccgcctcctcctcctccgcctcctcctcctccgcctcctcctcctccgcctcctcctcctccgcctcctcctcctccgcctcctcctcctccgcctcttcctctgcgggcggggctggtgggagcgtcgcgtccgcgtccggcgctggggagagacgagaaacctccctcggcccccgcgctgctgcgccgcgggggccgaggaagtgtgccaggaagacgcgccacgcggagggcggccccgagcccggggcccgcgacccggcgcccggcctcacgcgctacctgcccatcgcgggggtctcgagcgtcgtggccctggcgccttacgtgaacaagacggtcacgggggactgcctgcccgtcctggacatggagacgggccacataggggcctacgtggtcctcgtggaccagacggggaacgtggcggacctgctgcgggccgcggcccccgcgtggagccgccgcaccctgctccccgagcacgcgcgcaactgcgtgaggccccccgactacccgacgccccccgcgtcggagtggaacagcctctggatgaccccggtgggcaacatgctctttgaccagggcaccctggtgggcgcgctggacttccacggcctccggtcgcgccacccgtggtctcgggagcagggcgcgcccgcgccggccggcgacgcccccgcgggccacggggagtag

SEQ ID NO: 174 - DNA, 2304 bp, Human herpesvirus 2
  source 1..2304: mol_type = genomic DNA
atgcgcggggggggcttggtttgcgcgctggtcgtgggggcgctggtggccgcggtggcgtcggcggccccggcggccccccgcgcctcgggcggcgtggccgcgaccgtcgcggcgaacgggggtcccgcctcccagccgccccccgtcccgagccccgcgaccaccaaggcccggaagcggaaaaccaaaaagccgcccaagcggcccgaggcgaccccgccccccgacgccaacgcgaccgtcgccgccggccacgccacgctgcgcgcgcacctgcgggaaatcaaggtcgagaacgccgatgcccagttttacgtgtgcccgcccccgacgggcgccacggtggtgcagtttgagcagccgcgccgctgcccgacgcgcccggaggggcagaactacacggagggcatcgcggtggtcttcaaggagaacatcgccccgtacaaattcaaggccaccatgtactacaaagacgtgaccgtgtcgcaggtgtggttcggccaccgctactcccagtttatggggatattcgaggaccgcgcccccgttcccttcgaggaggtgatcgacaagattaacgccaagggggtctgccgctccacggccaagtacgtgcggaacaacatggagaccaccgcgtttcaccgggacgaccacgagaccgacatggagctcaagccggcgaaggtcgccacgcgcacgagccgggggtggcacaccaccgacctcaagtacaacccctcgcgggtggaggcgttccatcggtacggcacgacggtcaactgcatcgtcgaggaggtggacgcgcggtcggtgtacccgtacgatgagtttgtgctggcgacgggcgactttgtgtacatgtccccgttttacggctaccgggaggggtcgcacaccgagcacaccagctacgccgccgaccgcttcaagcaggtcgacggcttctacgcgcgcgacctcaccacgaaggcccgggccacgtcgccgacgacccgcaacttgctgacgacccccaagtttaccgtggcctgggactgggtgccgaagcgaccggcggtctgcaccatgaccaagtggcaggaggtggacgagatgctccgcgccgagtacggcggctccttccgcttctcctccgacgccatctcgaccaccttcaccaccaacctgacccagtactcgctctcgcgcgtcgacctgggcgactgcatcggccgggatgcccgcgaggccatcgaccgcatgtttgcgcgcaagtacaacgccacgcacatcaaggtgggccagccgcagtactacctggccacggggggcttcctcatcgcgtaccagcccctcctcagcaacacgctcgccgagctgtacgtgcgggagtacatgcgggagcaggaccgcaagccccggaatgccacgcccgcgccactgcgggaggcgcccagcgccaacgcgtccgtggagcgcatcaagaccacctcctcgatcgagttcgcccggctgcagtttacgtataaccacatacagcgccacgtgaacgacatgctggggcgcatcgccgtcgcgtggtgcgagctgcagaaccacgagctgactctctggaacgaggcccgcaagctcaaccccaacgccatcgcctccgccaccgtcggccggcgggtgagcgcgcgcatgctcggagacgtcatggccgtctccacgtgcgtgcccgtcgccccggacaacgtgatcgtgcagaactcgatgcgcgtcagctcgcggccggggacgtgctacagccgccccctggtcagctttcggtacgaagaccagggcccgctgatcgaggggcagctgggcgagaacaacgagctgcgcctcacccgcgacgcgctcgagccgtgcaccgtgggccaccggcgctacttcatcttcggcgggggctacgtgtacttcgaggagtacgcgtactctcaccagctgagtcgcgccgacgtcaccaccgtcagcaccttcatcgacctgaacatcaccatgctggaggaccacgagtttgtgcccctggaggtctacacgcgccacgagatcaaggacagcggcctgctggactacacggaggtccagcgccgcaaccagctgcacgacctgcgctttgccgacatcgacacggtcatccgcgccgacgccaacgccgccatgttcgcggggctgtgcgcgttcttcgaggggatgggggacttggggcgcgcggtcggcaaggtcgtcatgggagtagtggggggcgtggtgtcggccgtctcgggcgtgtcctcctttatgtccaacccc

SEQ ID NO: 175 - DNA, 1341 bp, Human herpesvirus 2
  source 1..1341: mol_type = genomic DNA
atggcccttggacgggtgggcctagccgtgggcctgtggggcctgctgtgggtgggtgtggtcgtggtgctggccaatgcctcccccggacgcacgataacggtgggcccgcgggggaacgcgagcaatgccgccccctccgcgtccccgcggaacgcatccgccccccgaaccacacccacgcccccccaaccccgcaaggcgacgaaaagtaaggcctccaccgccaaaccggccccgccccccaagaccgggcccccgaagacatcctcggagcccgtgcgatgcaaccgccacgacccgctggcccggtacggctcgcgggtgcaaatccgatgccggtttcccaactccacccgcacggagtcccgcctccagatctggcgttatgccacggcgacggacgccgagatcggaacggcgcctagcttagaggaggtgatggtaaacgtgtcggccccgcccgggggccaactggtgtatgacagcgcccccaaccgaacggacccgcacgtgatctgggcggagggcgccggcccgggcgccagcccgcggctgtactcggtcgtcgggccgctgggtcggcagcggctcatcatcgaagagctgaccctggagacccagggcatgtactactgggtgtggggccggacggaccgcccgtccgcgtacgggacctgggtgcgcgttcgcgtgttccgccctccgtcgctgaccatccacccccacgcggtgctggagggccagccgtttaaggcgacgtgcacggccgccacctactacccgggcaaccgcgcggagttcgtctggttcgaggacggtcgccgggtattcgatccggcccagatacacacgcagacgcaggagaaccccgacggcttttccaccgtctccaccgtgacctccgcggccgtcggcggccagggccccccgcgcaccttcacctgccagctgacgtggcaccgcgactccgtgtcgttctctcggcgcaacgccagcggcacggcatcggtgctgccgcggccaaccattaccatggagtttacgggcgaccatgcggtctgcacggccggctgtgtgcccgagggggtgacgtttgcctggttcctgggggacgactcctcgccggcggagaaggtggccgtcgcgtcccagacatcgtgcgggcgccccggcaccgccacgatccgctccaccctgccggtctcgtacgagcagaccgagtacatctgccggctggcgggatacccggacggaattccggtcctagagcaccacggcagccaccagcccccgccgcgggaccccaccgagcggcaggtgatccgggcggtggagggg

SEQ ID NO: 176 - DNA, 1017 bp, Human herpesvirus 2
  source 1..1017: mol_type = genomic DNA
atggggcgtttgacctccggcgtcgggacggcggccctgctagttgtcgcggtgggactccgcgtcgtctgcgccaaatacgccttagcagacccctcgcttaagatggccgatcccaatcgatttcgcgggaagaaccttccggttttggaccagctgaccgacccccccggggtgaagcgtgtttaccacattcagccgagcctggaggacccgttccagccccccagcatcccgatcactgtgtactacgcagtgctggaacgtgcctgccgcagcgtgctcctacatgccccatcggaggccccccagatcgtgcgcggggcttcggacgaggcccgaaagcacacgtacaacctgaccatcgcctggtatcgcatgggagacaattgcgctatccccatcacggttatggaatacaccgagtgcccctacaacaagtcgttgggggtctgccccatccgaacgcagccccgctggagctactatgacagctttagcgccgtcagcgaggataacctgggattcctgatgcacgcccccgccttcgagaccgcgggtacgtacctgcggctagtgaagataaacgactggacggagatcacacaatttatcctggagcaccgggcccgcgcctcctgcaagtacgctctccccctgcgcatccccccggcagcgtgcctcacctcgaaggcctaccaacagggcgtgacggtcgacagcatcgggatgctaccccgctttatccccgaaaaccagcgcaccgtcgccctatacagcttaaaaatcgccgggtggcacggccccaagcccccgtacaccagcaccctgctgccgccggagctgtccgacaccaccaacgccacgcaacccgaactcgttccggaagaccccgaggactcggccctcttagaggatcccgccgggacggtgtcttcgcagatccccccaaactggcacatcccgtcgatccaggacgtcgcgccgcaccacgcccccgccgcccccagcaacccg

SEQ ID NO: 177 - DNA, 1251 bp, Human herpesvirus 2
  source 1..1251: mol_type = genomic DNA
atggctcgcggggccgggttggtgttttttgttggagtttgggtcgtatcgtgcctggcggcagcacccagaacgtcctggaaacgggtaacctcgggcgaggacgtggtgttgcttccggcgcccgcggggccggaggaacgcacccgggcccacaaactactgtgggccgcggaacccctggatgcctgcggtcccctgcgcccgtcgtgggtggcgctgtggcccccccgacgggtgctcgagacggtcgtggatgcggcgtgcatgcgcgccccggaaccgctcgccatagcatacagtcccccgttccccgcgggcgacgagggactgtattcggagttggcgtggcgcgatcgcgtagccgtggtcaacgagagtctggtcatctacggggccctggagacggacagcggtctgtacaccctgtccgtggtcggcctaagcgacgaggcgcgccaagtggcgtcggtggttctggtcgtggagcccgcccctgtgccgaccccgacccccgacgactacgacgaagaagacgacgcgggcgtgagcgaacgcacgccggtcagcgttccccccccaacccccccccgtcgtccccccgtcgcccccccgacgcaccctcgtgttatccccgaggtgtcccacgtgcgcggggtaacggtccatatggagaccccggaggccattctgtttgcccccggggagacgtttgggacgaacgtctccatccacgccattgcccacgacgacggtccgtacgccatggacgtcgtctggatgcggtttgacgtgccgtcctcgtgcgccgagatgcggatctacgaagcttgtctgtatcacccgcagcttccagagtgtctatctccggccgacgcgccgtgcgccgtaagttcctgggcgtaccgcctggcggtccgcagctacgccggctgttccaggactacgcccccgccgcgatgttttgccgaggctcgcatggaaccggtcccggggttggcgtggctggcctccaccgtcaatctggaattccagcacgcctccccccagcacgccggcctctacctgtgcgtggtgtacgtggacgatcatatccacgcctggggccacatgaccatcagcaccgcggcgcagtaccggaacgcggtggtggaacagcacctcccccagcgccagcccgagcccgtcgagcccacccgcccgcacgtgagagccccccctcccgcgccctccgcgcgcggcccgctgcgc

SEQ ID NO: 178 - DNA, 786 bp, Human herpesvirus 2
  source 1..786: mol_type = genomic DNA
atgcccggccgctcgctgcagggcctggcgatcctgggcctgtgggtctgcgccaccggcctggtcgtccgcggccccacggtcagtctggtctcagactcactcgtggatgccggggccgtggggccccagggcttcgtggaagaggacctgcgtgttttcggggagcttcattttgtgggggcccaggtcccccacacaaactactacgacggcatcatcgagctgtttcactaccccctggggaaccactgcccccgcgttgtacacgtggtcacactgaccgcatgcccccgccgccccgccgtggcgttcaccttgtgtcgctcgacgcaccacgcccacagccccgcctatccgaccctggagctgggtctggcgcggcagccgcttctgcgggttcgaacggcaacgcgcgactatgccggtctgtatgtcctgcgcgtatgggtcggcagcgcgacgaacgccagcctgtttgttttgggggtggcgctctctgccaacgggacgtttgtgtataacggctcggactacggctcctgcgatccggcgcagcttcccttttcggccccgcgcctgggaccctcgagcgtatacacccccggagcctcccggcccacccctccacggacaacgacatccccgtcctccccccgagacccgacccccgcccccggggacacagggacgcccgcgcccgcgagcggcgagagagccccgcccaattccacgcgatcggccagcgaatcgagacacaggctaaccgtagcccaggtaatccag

SEQ ID NO: 179 - DNA, 3885 bp, synthetic construct
  misc_feature 1..3885: note = Synthetic Polynucleotide
  source 1..3885: mol_type = other DNA
atgtcggcggagcagcggaagaagaagaagacgacgacgacgacgcagggccgcggggccgaggtcgcgatggcggacgaggacgggggacgtctccgggccgcggcggagacgaccggcggccccggatctccggatccagccgacggaccgccgcccaccccgaacccggaccgtcgccccgccgcgcggcccgggttcgggtggcacggtgggccggaggagaacgaagacgaggccgacgacgccgccgccgatgccgatgccgacgaggcggccccggcgtccggggaggccgtcgacgagcctgccgcggacggcgtcgtctcgccgcggcagctggccctgctggcctcgatggtggacgaggccgttcgcacgatcccgtcgccccccccggagcgcgacggcgcgcaagaagaagcggcccgctcgccttctccgccgcggaccccctccatgcgcgccgattatggcgaggagaacgacgacgacgacgacgacgacgatgacgacgaccgcgacgcgggccgctgggtccgcggaccggagacgacgtccgcggtccgcggggcgtacccggaccccatggccagcctgtcgccgcgacccccggcgccccgccgacaccaccaccaccaccaccaccgccgccggcgcgccccccgccggcgctcggccgcctctgactcatcaaaatccggatcctcgtcgtcggcgtcctccgcctcctcctccgcctcctcctcctcgtctgcatccgcctcctcgtctgacgacgacgacgacgacgacgccgcccgcgcccccgccagcgccgcagaccacgccgcgggcgggaccctcggcgcggacgacgaggaggcgggggtgcccgcgagggccccgggggcggcgccccggccgagcccgcccagggccgagcccgccccggcccggacccccgcggcgaccgcgggccgcctggagcgccgccgggcccgcgcggcggtggccggccgcgacgccacgggccgcttcacggccgggcggccccggcgggtcgagctggacgccgacgcggcctccggcgccttctacgcgcgctaccgcgacgggtacgtcagcggggagccgtggcccggggccggccccccgcccccggggcgcgtgctgtacggcgggctgggcgacagccgccccggcctctggggggcgcccgaggcggaggaggcgcgggcccggttcgaggcctcgggcgccccggcgcccgtgtgggcgcccgagctgggcgacgcggcgcagcagtacgccctgatcacgcggctgctgtacacgccggacgcggaggcgatggggtggctccagaacccgcgcgtggcgcccggggacgtggcgctggaccaggcctgcttccggatctcgggcgcggcgcgcaacagcagctccttcatctccggcagcgtggcgcgggccgtgccccacctggggtacgccatggcggcgggccgcttcggctggggcctggcgcacgtggcggccgccgtggccatgagccgccgctacgaccgcgcgcagaagggcttcctgctgaccagcctgcgccgcgcctacgcgcccctgctggcgcgcgagaacgcggcgctgaccggggcgcgaacccccgacgacggcggcgacgccaaccgccacgacggcgacgacgcccgcgggaagcccgccgccgccgccgccccgttgccgtcggcggcggcgtcgccggccgacgagcgcgcggtgcccgccggctacggcgccgcgggggtgctcgccgccctggggcgcctgagcgccgcgcccgcctccgcgccggccggggccgacgacgacgacgacgacgacggcgccggcggtggtggcggcggccggcgcgcggaggcgggccgcgtggccgtggagtgcctggccgcctgccgcgggatcctggaggcgctggcggagggcttcgacggcgacctggcggccgtgccggggctggccggagcccggcccgccgcgcccccgcgcccggggcccgcgggcgcggccgccccgccgcacgccgacgcgccccgcctgcgcgcctggctgcgcgagctgcggttcgtgcgcgacgcgctggtgctgatgcgcctgcgcggggacctgcgcgtggccggcggcagcgaggccgccgtggccgccgtgcgcgccgtgagcctggtcgccggggccctgggcccggcgctgccgcggagcccgcgcctgctgagctccgccgccgccgccgccgcggacctgctcttccagaaccagagcctgcgccccctgctggccgacaccgtcgccgcggccgactcgctcgccgcgcccgcctccgcgccgcgggaggccgcggacgccccccgccccgcggccgcccctcccgcgggggccgcgccccccgccccgccgacgccgccgccgcggccgccgcgccccgcggcgctgacccgccggcccgccgagggccccgacccgcagggcggctggcgccgccagccgccggggcccagccacacgccggcgccctcggccgccgccctggaggcctactgcgccccgcgggccgtggccgagctcacggaccacccgctcttccccgcgccgtggcgcccggccctcatgttcgacccgcgcgcgctggcctcgctggccgcgcgctgcgccgccccgccccccggcggcgcgcccgccgccttcggcccgctgcgcgcctcgggcccgctgcgccgcgcggcggcctggatgcgccaggtgcccgacccggaggacgtgcgcgtggtgatcctctactcgccgctgccgggcgaggacctggccgcgggccgcgccgggggcgggccccccccggagtggtccgccgagcgcggcgggctgtcctgcctgctggcggccctgggcaaccggctctgcgggcccgccacggccgcctgggcgggcaactggaccggcgcccccgacgtctcggcgctgggcgcgcagggcgtgctgctgctgtccacgcgggacctggccttcgccggcgccgtggagttcctggggctgctggccggcgcctgcgaccgccgcctcatcgtcgtcaacgccgtgcgcgccgcggcctggcccgccgctgcccccgtggtctcgcggcagcacgcctacctggcctgcgaggtgctgcccgccgtgcagtgcgccgtgcgctggccggcggcgcgggacctgcgccgcaccgtgctggcctccggccgcgtgttcgggccgggggtcttcgcgcgcgtggaggccgcgcacgcgcgcctgtaccccgacgcgccgccgctgcgcctctgccgcggggccaacgtgcggtaccgcgtgcgcacgcgcttcggccccgacacgctggtgcccatgtccccgcgcgagtaccgccgcgccgtgctcccggcgctggacggccgggccgccgcctcgggcgcgggcgacgccatggcgcccggcgcgccggacttctgcgaggacgaggcgcactcgcaccgcgcctgcgcgcgctggggcctgggcgcgccgctgcggcccgtctacgtggcgctggggcgcgacgccgtgcgcggcggcccggcggagctgcgcgggccgcggcgggagttctgcgcgcgggcgctgctcgagcccgacggcgacgcgcccccgctggtgctgcgcgacgacgcggacgcgggcccgcccccgcagatacgctgggcgtcggccgcgggccgcgcggggacggtgctggccgcggcgggcggcggcgtggaggtggtggggaccgccgcggggctggccacgccgccgaggcgcgagcccgtggacatggacgcggagctggaggacgacgacgacggactgtttggggagtga

SEQ ID NO: 180 - protein, 480 aa, Human herpesvirus 2
MALGRVGLAVGLWGLLWVGVVVVLANASPGRTITVGPRGNASNAAPSASPRNASAPRTTPTPPQPRKATKSKASTAKPAPPPKTGPPKTSSEPVRCNRHDPLARYGSRVQIRCRFPNSTRTESRLQIWRYATATDAEIGTAPSLEEVMVNVSAPPGGQLVYDSAPNRTDPHVIWAEGAGPGASPRLYSVVGPLGRQRLIIEELTLETQGMYYWVWGRTDRPSAYGTWVRVRVFRPPSLTIHPHAVLEGQPFKATCTAATYYPGNRAEFVWFEDGRRVFDPAQIHTQTQENPDGFSTVSTVTSAAVGGQGPPRTFTCQLTWHRDSVSFSRRNASGTASVLPRPTITMEFTGDHAVCTAGCVPEGVTFAWFLGDDSSPAEKVAVASQTSCGRPGTATIRSTLPVSYEQTEYICRLAGYPDGIPVLEHHGSHQPPPRDPTERQVIRAVEGAGIGVAVLVAVVLAGTAVVYLTHASSVRYRRLR

SEQ ID NO: 181 - protein, 480 aa, Human herpesvirus 2
MALGRVGLAVGLWGLLWVGVVVVLANASPGRTITVGPRGNASNAAPSASPRNASAPRTTPTPPQPRKATKSKASTAKPAPPPKTGPPKTSSEPVRCNRHDPLARYGSRVQIRCRFPNSTRTEFRLQIWRYATATDAEIGTAPSLEEVMVNVSAPPGGQLVYDSAPNRTDPHVIWAEGAGPGASPRLYSVVGPLGRQRLIIEELTLETQGMYYWVWGRTDRPSAYGTWVRVRVFRPPSLTIHPHAVLEGQPFKATCTAATYYPGNRAEFVWFEDGRRVFDPAQIHTQTQENPDGFSTVSTVTSAAVGGQGPPRTFTCQLTWHRDSVSFSRRNASGTASVLPRPTITMEFTGDHAVCTAGCVPEGVTFAWFLGDDSSPAEKVAVASQTSCGRPGTATIRSTLPVSYEQTEYICRLAGYPDGIPVLEHHGSHQPPPRDPTERQVIRAVEGAGIGVAVLVAVVLAGTAVVYLTHASSVRYRRLR

SEQ ID NO: 182 - protein, 479 aa, Human herpesvirus 2 [sequence omitted]

SEQ ID NO: 183 - protein, 480 aa, Human herpesvirus 2
MALGRVGLAVGLWGLLWVGVVVVLANASPGRTITVGPRGNASNAAPSASPRNASAPRTTPTPPQPRKATKSKASTAKPAPPPKTGPPKTSSEPVRCNRHDPLARYGSRVQIRCRFPNSTRTESRLQIWRYATATDAEIGTAPSLEEVMVNVSAPPGGQLVYDSPPNRTDPHVIWAEGAGPGASPRLYSVVGPLGRQRLIIEELTLETQGMYYWVWGRTDRPSAYGTWVRVRVFRPPSLTIHPHAVLEGQPFKATCTAATYYPGNRAEFVWFEDGRRVFDPAQIHTQTQENPDGFSTVSTVTSAAVGGQGPPRTFTCQLTWHRDSVSFSRRNASGTASVLPRPTITMEFTGDHAVCTAGCVPEGVTFAWFLGDDSSPAEKVAVASQTSCGRPGTATIRSTLPVSYEQTEYICRLAGYPDGIPVLEHHGSHQPPPRDPTERQVIRAVEGAGIGVAVLVAVVLAGTAVVYLTHASSVRYRRLR

SEQ ID NO: 184 - protein, 480 aa, Human herpesvirus 2
MALGRVGLAVGLWGLLWVGVVVVLANASPGRTITVGPRGNASNAAPSASPRNASAPRTTPTPPQPRKATKSKASTAKPAPPPKTGPPKTSSEPVRCNRHDPLARYGSRVQIRCRFPNSTRTESRLQIWRYATATDAEIGTAPSLEEVMVNVSAPPGGQLVYDSAPNRTDPHVIWAEGAGPGASPRLYSVVGPLGRQRPIIEELTLETQGMYYWVWGRTDRPSAYGTWVRVRVFRPPSLTIHPHAVLEGQPFKATCTAATYYPGNRAEFVWFEDGRRVFDPAQIHTQTQENPDGFSTVSTVTSAAVGGQGPPRTFTCQLTWHRDSVSFSRRNASGTASVLPRPTITMEFTGDHAVCTAGCVPEGVTFAWFLGDDSSPAEKVAVASQTSCGRPGTATIRSTLPVSYEQTEYICRLAGYPDGIPVLEHHGSHQPPPRDPTERQVIRAVEGAGIGVAVLVAVVLAGTAVVYLTHASSVRYRRLR

SEQ ID NO: 185 - protein, 480 aa, Human herpesvirus 2
MALGRVGLAVGLWGLLWVGVVVVLANASPGRTITVGPRGNASNAAPSASPRNASAPRTTPTPPQPRKATKSKASPAKPAPPPKTGPPKTSSEPVRCNRHDPLARYGSRVQIRCRFPNSTRTEFRLQIWRYATATDAEIGTAPSLEEVMVNVSAPPGGQLVYDSAPNRTDPHVIWAEGAGPGASPRLYSVVGPLGRQRLIIEELTLETQGMYYWVWGRTDRPSAYGTWVRVRVFRPPSLTIHPHAVLEGQPFKATCTAATYYPGNRAEFVWFEDGRRVFDPAQIHTQTQENPDGFSTVSTVTSAAVGGQGPPRTFTCQLTWHRDSVSFSRRNASGTASVLPRPTITMEFTGDHAVCTAGCVPEGVTFAWFLGDDSSPAEKVAVASQTSCGRPGTATIRSTLPVSYEQTEYICRLAGYPDGIPVLEHHGSHQPPPRDPTERQVIRAVEGAGIGVAVLVAVVLAGTAVVYLTHASSVRYRRLR

SEQ ID NO: 186 - protein, 480 aa, Human herpesvirus 2
MALGRVGLAVGLWGLLWVGVVVVLANASPGRTITVGPRGNASNAAPSASPRNASAPRTTPTPPQPRKATKSKASTAKPAPPPKTGPPKTSSEPVRCNRHDPLARYGSRVQIRCRFPNSTRTEFRLQIWRYATATDAEIGTAPSLEEVMVNVSAPPGGQLVYDSAPNRTDPHVIWAEGAGPGASPRLYSVVGPLGRQRLIIEELTLETQGMYYWVWGRTDRPSAYGTWVRVRVFRPPSLTIHPHAVLEGQPFKATCTAATYYPGNRAEFVWFEDGRRVFDPAQIHTQTQENPDGFSTVSTVTSAAVGGQGPPRTFTCQLTWHRDSVSFSRRNASGTASVLPRPTITMEFTGDHAVCTAGCVPEGVTFAWFLGDDSSPAEKVAVASQTSCGRPGTATIRSTLPVSYEQTEYICRLAGYPHGIPVLEHHGSHQPPPRDPTERQVIRAVEGAGIGVAVLVAVVLAGTAVVYLTHASSVRYRRLR

SEQ ID NO: 187 - protein, 480 aa, Human herpesvirus 2
MALGRVGLAVGLWGLLWVGVVVVLANASPGRTITVGPRGNASNAAPSASPRNASAPRTTPTPPQPRKATKSKASTAKPAPPPKTGPPKTSSEPVRCNRHDPLARYGSRVQIRCRFPNSTRTEFRLQIWRYATATDAEIGTAPSLEEVMVNVSAPPGGQLVYDSAPNRTDPHVIWAEGAGPGASPRLYSVVGPLGRQRLIIEELTLETQGMYYWVWGRTDRPSAYGTWVRVRVFRPPSLTIHPHAVLEGQPFKATCTAATYYPGNRAEFVWFEDGRRVFDPAQIHTQTQENPDGFSTVSTVTSAAVGGQGPPRTFTCQLTWHRDSVSFSRRNASGTASVLPRPTITMEFTGDHAVCTAGCVPEGVTFAWFLGDDSSPAEKVAVASQTSCGRPGTATIRSTLPVSYEQTEYICRLAGYPDGIPVLEHHGSHQPPPRDPTKRQVIRAVEGAGIGVAVLVAVVLAGTAVVYLTHASSVRYRRLR

SEQ ID NO: 188 - protein, 393 aa, Human herpesvirus 2
MGRLTSGVGTAALLVVAVGLRVVCAKYALADPSLKMADPNRFRGKNLPVLDQLTDPPGVKRVYHIQPSLEDPFQPPSIPITVYYAVLERACRSVLLHAPSEAPQIVRGASDEARKHTYNLTIAWYRMGDNCAIPITVMEYTECPYNKSLGVCPIRTQPRWSYYDSFSAVSEDNLGFLMHAPAFETAGTYLRLVKINDWTEITQFILEHRARASCKYALPLRIPPAACLTSKAYQQGVTVDSIGMLPRFTPENQRTVALYSLKIAGWHGPKPPYTSTLLPPELSDTTNATQPELVPEDPEDSALLEDPAGTVSSQIPPNWHIPSIQDVAPHHAPAAPANPGLIIGALAGSTLAALVIGGIAFWVRRRRSVAPKRLRLPHIRDDDAPPSHQPLFY

SEQ ID NO: 189 - protein, 393 aa, Human herpesvirus 2
MGRLTSGVGTAALLVVAVGLRVVCAKYALADPSLKMADPNRFRGKNLPVLDQLTDPPGVKRVYHIQPSLEDPFQPPSIPITVYYAVLERACRSVLLHAPSEAPQIVRGASDEARKHTYNLTIAWYRMGDNCAIPITVMEYTECPYNKSLGVCPIRTQPRWSYYDSFSAVSEDNLGFLMHAPAFETAGTYLRLVKINDWTEITQFILEHRARASCKYALPLRIPPAACLTSKAYQQGVTVDSIGMLPRFIPENQRTVALYSLKIAGWHGPKPPYTSTLLPPELSDTTNATQPELVPEDPEDSALLEDPAGTVSSQIPPNWHIPSIQDVAPHHAPAAPSNPGLIIGALAGSTLAALVIGGIAFWVRRRAQMAPKRPRLPHIRDDDAPPSHQPLFY

SEQ ID NO: 190 - protein, 393 aa, Human herpesvirus 2
MGRLTSGVGTAALLVVAVGLRVVCAKYALADPSLKMADPNRFRGKNLPVLDQLTDPPGVKRVYHIQPSLEDPFQPPSIPITVYYAVLERACRSVLLHAPSEAPQIVRGASDEARKHTYNLTIAWYRMGDNCAIPITVMEYTECPYNKSLGVCPIRTQPRWSYYDSFSAVSEDTLGFLMHAPAFETAGTYLRLVKINDWTEITQFILEHRARASCKYALPLRIPPAACLTSKAYQQGVTVDSIGMLPRFIPENQRTVALYSLKIAGWHGPKPPYTSTLLPPELSDTTNATQPELVPEDPEDSALLEDPAGTVSSQIPPNWHIPSIQDVAPHHAPAAPSNPGLIIGALAGSTLAVLVIGGIAFWVRRRAQMAPKRLRLPHIRDDDAPPSHQPLFY

SEQ ID NO: 191 - protein, 393 aa, Human herpesvirus 2
MGRLTSGVGTAALLVVAVGLRVVYAKYALADPSLKMADPNRFRGKNLPVLDQLTDPPGVKRVYHIQPSLEDPFQPPSIPITVYYAVLERACRSVLLHAPSEAPQIVRGASDEARKHTYNLTIAWYRMGDNCAIPITVMEYTECPYNKSLGVCPIRTQPRWSYYDSFSAVSEDNLGFLMHAPAFETAGTYMRLVKINDWTEITQFILEHRARASCKYALPLRIPPAACLTSKAYQQGVTVDSIGMLPRFIPENQRTVALYSLKIAGWHGPKPPYTSTLLPPELSDTTNATQPELVPEDPEDSALLEDPAGTVSSQIPPNWHIPSIQDVAPHHAPAAPSNPGLIIGALAGSTLAALVIGGIAFWVRRRAQMAPKRLRLPHIRDDDAPPSHQPLFY

SEQ ID NO: 192 - protein, 393 aa, Human herpesvirus 2
MGRLTSGVGTAALLVVAVGLRVVYAKYALADPSLKMADPNRFRGKNLPVLDQLTDPPGVKRVYHIQPSLEDPFQPPSIPITVYYAVLERACRSVLLHAPSEAPQIVRGASDEARKHTYNLTIAWYRMGDNCAIPITVMEYTECPYNKSLGVCPIRTQPRWSYYDSFSAVSEDNLGFLMHAPAFETAGTYLRLVKINDWTEITQFILEHRARASCKYALPLRIPPAACLTSKAYQQGVTVDSIGMLPRFIPENQRTVALYSLKIAGWHGPKPPYTSTLLPPELSDTTNATQPELVPEDPEDSALLEDPAGTVSSQIPPNWHIPSIQDVAPHHAPAAPSNPGLIIGALAGSTLAALVIGGIAFWVRRRAQMAPKRLRLPHIRDDDAPPSHQPLFY

SEQ ID NO: 193 - protein, 393 aa, Human herpesvirus 2
MGRLTSGVGTAALLVVAVGLRVVCAKYALADPSLKMADPNRFRGKNLPVLDQLTDPPGVKRVYHIQPSLEDPFQPPSIPITVYYAVLERACRSVLLHAPSEAPQIVRGASDEARKHTYNLTIAWYRMGDNCAIPITVMEYTECPYNKSLGVCPIRTQPRWSYYDSFSAASEDNLGFLMHAPAFETAGTYLRLVKINDWTEITQFILEHRARASCKYALPLRIPPAACLTSKAYQQGVTVDSIGMLPRFIPENQRTVALYSLKIAGWHGPKPPYTSTLLPPELSDTTNATQPELVPEDPEDSALLEDPAGTVSSQIPPNWHIPSIQDVAPHHAPAAPSNPGLIIGALAGSTLAVLVIGGIAFWVRRRAQMAPKRLRLPHIRDDDAPPSHQPLFY

SEQ ID NO: 194 - protein, 393 aa, Human herpesvirus 2
MGRLTSGVGTAALLVVAVGLRVVCAKYALADPSLKMADPNRFRGKNLPVLDRLTDPPGVKRVYHIQPSLEDPFQPPSIPITVYYAVLERACRSVLLHAPSEAPQIVRGASDEARKHTYNLTIAWYRMGDNCAIPITVMEYTECPYNKSLGVCPIRTQPRWSYYDSFSAVSEDNLGFLMHAPAFETAGTYLRLVKINDWTEITQFILEHRARASCKYALPLRIPPAACLTSKAYQQGVTVDSIGMLPRFIPENQRTVALYSLKIAGWHGPKPPYTSTLLPPELSDTTNATQPELVPEDPEDSALLEDPAGTVSSQIPPNWHIPSIQDVAPHHAPAAPSNPGLIIGALAGSTLAVLVIGGIAFWVRRRAQMAPKRLRLPHIRDDDAPPSHQPLFY

SEQ ID NO: 195 - protein, 393 aa, Human herpesvirus 2
MGRLTSGVGTAALLVVAVGLRVVCAKYALADPSLKMADPNRFRGKNLPVLDQLTDPPGVKRVYHIQPSLEDPFQPPSIPITVYYAVLERACRSVLLHAPSEAPQIVRGASDEARKHTYNLTIAWYRMGDNCAIPITVMEYTECPYNKSLGVCPIRTQPRWSYYDSFSAVSEDNLGFLMHAPAFETAGTYLRLVKINDWTEITQFILEHRARASCKYALPLRIPPAACLTSKAYQQGVTVDSIGMLPRFIPENQRTVALYSLKIAGWHGPKPPYTSTLLPPELSDTTNATQPELVPEDPEDSALLEDPAGTVSSQIPPNWHIPSIQDVAPHHAPAAPSNPGLIIGALAGSTLAVLVIGGIAFWVRRRAQMAPKRLRLPHIRDDDAPPSHQPLFY

SEQ ID NO: 196 - protein, 393 aa, Human herpesvirus 2
MGRLTSGVGTAALLVVAVGLRVVCAKYALADPSLKMADPNRFRGKNLPVLDQLTDPPGVKRVYHIQPSLEDPFQPPSIPITVYYAVLERACRSVLLHAPSEAPQIVRGASDEARKHTYNLTIAWYRMGDNCAIPITVMEYTECPYNKSLGVCPIRTQPRWSYYDSFSAVSEDNLGFLMHAPAFETAGTYLRLVKINDWTEITQFILEHRARASCKYALPLRIPPAACLTSKAYQQGVTVDSIGMLPRFIPENQRTVALYSLKIAGWHGPKPPYTSTLLPPELSDTTNATQPELVPEDPEDSALLEDPAGTVSSQIPPNWHIPSIQDVAPHHAPAAPSNPGLIIGALAGSTLAALVIGGIAFWVRRRAQMAPKRLRLPHIRDDDAPPSHQPLFY

SEQ ID NO: 197 - protein, 393 aa, Human herpesvirus 2; identical to SEQ ID NO: 196

SEQ ID NO: 198 - protein, 901 aa, Human herpesvirus 2
MRGGGLVCALVVGALVAAVASAAPAAPRASGGVAATVAANGGPASQPPPVPSPATTKARKRKTKKPPKRPEATPPPDANATVAAGHATLRAHLREIKVENADAQFYVCPPPTGATVVQFEQPRRCPTRPEGQNYTEGIAVVFKENIAPYKFKATMYYKDVTVSQVWFGHRYSQFMGIFEDRAPVPFEEVIDKINAKGVCRSTAKYVRNNMETTAFHRDDHETDMELKPAKVATRTSRGWHTTDLKYNPSRVEAFHRYGTTVNCIVEEVDARSVYPYDEFVLATGDFVYMSPFYGYREGSHTEHTSYAADRFKQVDGFYARDLTTKARATSPTTRNLLTTPKFTVAWDWVPKRPAVCTMTKWQEVDEMLRAEYGGSFRFSSDAISTTFTTNLTQYSLSRVDLGDCIGRDAREAIDRMFARKYNATHIKVGQPQYYLATGGFLIAYQPLLSNTLAELYVREYMREQDRKPRNATPAPLREAPSANASVERIKTTSSIEFARLQFTYNHIQRHVNDMLGRIAVAWCELQNHELTLWNEARKLNPNAIASATVGRRVSARMLGDVMAVSTCVPVAPDNVIVQNSMRVSSRPGTCYSRPLVSFRYEDQGPLIEGQLGENNELRLTRDALEPCTVGHRRYFIFGGGYVYFEEYAYSHQLSRADVTTVSTFIDLNITMLEDHEFVPLEVYTRHEIKDSGLLDYTEVQRRNQLHDLRFADIDTVIRADANAAMFAGLCAFFEGMGDLGRAVGKVVMGVVGGVVSAVSGVSSFMSNPFGALAVGLLVLAGLVAAFFAFRYVLQLQRNPMKALYPLTTKELKTSDPGGVGGEGEEGAEGGGFDEAKLAEAREMIRYMALVSAMERTEHKARKKGTSALLSSKVTNMVLRKRNKARYSPLHNEDEAGDEDEL

SEQ ID NO: 199 - protein, 480 aa, Human herpesvirus 2; identical to SEQ ID NO: 180

SEQ ID NO: 200 - protein, 393 aa, Human herpesvirus 2; identical to SEQ ID NO: 195

SEQ ID NO: 201 - protein, 548 aa, Human herpesvirus 2
MARGAGLVFFVGVWVVSCLAAAPRTSWKRVTSGEDVVLLPAPAGPEERTRAHKLLWAAEPLDACGPLRPSWVALWPPRRVLETVVDAACMRAPEPLAIAYSPPFPAGDEGLYSELAWRDRVAVVNESLVIYGALETDSGLYTLSVVGLSDEARQVASVVLVVEPAPVPTPTPDDYDEEDDAGVSERTPVSVPPPTPPRRPPVAPPTHPRVIPEVSHVRGVTVHMETPEAILFAPGETFGTNVSIHAIAHDDGPYAMDVVWMRFDVPSSCAEMRIYEACLYHPQLPECLSPADAPCAVSSWAYRLAVRSYAGCSRTTPPPRCFAEARMEPVPGLAWLASTVNLEFQHASPQHAGLYLCVVYVDDHIHAWGHMTISTAAQYRNAVVEQHLPQRQPEPVEPTRPHVRAPPPAPSARGPLRLGAVLGAALLLAALGLSAWACMTCWRRRSWRAVKSRASATGPTYIRVADSELYADWSSDSEGERDGSLWQDPPERPDSPSTNGSGFEILSPTAPSVYPHSEGRKSRRPLTTFGSGSPGRRHSQASYSSVLW

SEQ ID NO: 202 - protein, 372 aa, Human herpesvirus 2
MPGRSLQGLAILGLWVCATGLVVRGPTVSLVSDSLVDAGAVGPQGFVEEDLRVFGELHFVGAQVPHTNYYDGIIELFHYPLGNHCPRVVHVVTLTACPRRPAVAFTLCRSTHHAHSPAYPTLELGLARQPLLRVRTATRDYAGLYVLRVWVGSATNASLFVLGVALSANGTFVYNGSDYGSCDPAQLPFSAPRLGPSSVYTPGASRPTPPRTTTSPSSPRDPTPAPGDTGTPAPASGERAPPNSTRSASESRHRLTVAQVIQIAIPASIIAFVFLGSCICFIHRCQRRYRRPRGQIYNPGGVSCAVNEAAMARLGAELRSHPNTPPKPRRRSSSSTTMPSLTSIAEESEPGPVVLLSVSPRPRSGPTAPQEV

SEQ ID NO: 203 - protein, 753 aa, synthetic construct
  REGION 1..753: note = Synthetic Polypeptide
MEPRPGTSSRADPGPERPPRQTPGTQPAAPHAWGMLNDMQWLASSDSEEETEVGISDDDLHRDSTSEAGSTDTEMFEAGLMDAATPPARPPAERQGSPTPADAQGSCGGGPVGEEEAEAGGGGDVNTPVAYLIVGVTASGSFSTIPIVNDPRTRVEAEAAVRAGTAVDFIWTGNPRTAPRSLSLGGHTVRALSPTPPWPGTDDEDDDLADVDYVPPAPRRAPRRGGGGAGATRGTSQPAATRPAPPGAPRSSSSGGAPLRAGVGSGSGGGPAVAAVVPRVASLPPAAGGGRAQARRVGEDAAAAEGRTPPARQPRAAQEPPIVISDSPPPSPRRPAGPGPLSFVSSSSAQVSSGPGGGGLPQSSGRAARPRAAVAPRVRSPPRAAAAPVVSASADAAGPAPPAVPVDAHRAPRSRMTQAQTDTQAQSLGRAGATDARGSGGPGAEGGSGPAASSSASSSAAPRSPLAPQGVGAKRAAPRRAPDSDSGDRGHGPLAPASAGAAPPSASPSSQAAVAAASSSSASSSSASSSSASSSSASSSSASSSSASSSSASSSAGGAGGSVASASGAGERRETSLGPRAAAPRGPRKCARKTRHAEGGPEPGARDPAPGLTRYLPIAGVSSVVALAPYVNKTVTGDCLPVLDMETGHIGAYVVLVDQTGNVADLLRAAAPAWSRRTLLPEHARNCVRPPDYPTPPASEWNSLWMTPVGNMLFDQGTLVGALDFHGLRSRHPWSREQGAPAPAGDAPAGHGE

SEQ ID NO: 204 - protein, 768 aa, synthetic construct
  REGION 1..768: note = Synthetic Polypeptide
MRGGGLVCALVVGALVAAVASAAPAAPRASGGVAATVAANGGPASQPPPVPSPATTKARKRKTKKPPKRPEATPPPDANATVAAGHATLRAHLREIKVENADAQFYVCPPPTGATVVQFEQPRRCPTRPEGQNYTEGIAVVFKENIAPYKFKATMYYKDVTVSQVWFGHRYSQFMGIFEDRAPVPFEEVIDKINAKGVCRSTAKYVRNNMETTAFHRDDHETDMELKPAKVATRTSRGWHTTDLKYNPSRVEAFHRYGTTVNCIVEEVDARSVYPYDEFVLATGDFVYMSPFYGYREGSHTEHTSYAADRFKQVDGFYARDLTTKARATSPTTRNLLTTPKFTVAWDWVPKRPAVCTMTKWQEVDEMLRAEYGGSFRFSSDAISTTFTTNLTQYSLSRVDLGDCIGRDAREAIDRMFARKYNATHIKVGQPQYYLATGGFLIAYQPLLSNTLAELYVREYMREQDRKPRNATPAPLREAPSANASVERIKTTSSIEFARLQFTYNHIQRHVNDMLGRIAVAWCELQNHELTLWNEARKLNPNAIASATVGRRVSARMLGDVMAVSTCVPVAPDNVIVQNSMRVSSRPGTCYSRPLVSFRYEDQGPLIEGQLGENNELRLTRDALEPCTVGHRRYFIFGGGYVYFEEYAYSHQLSRADVTTVSTFIDLNITMLEDHEFVPLEVYTRHEIKDSGLLDYTEVQRRNQLHDLRFADIDTVIRADANAAMFAGLCAFFEGMGDLGRAVGKVVMGVVGGVVSAVSGVSSFMSNP

SEQ ID NO: 205 - protein, 447 aa, synthetic construct
  REGION 1..447: note = Synthetic Polypeptide
MALGRVGLAVGLWGLLWVGVVVVLANASPGRTITVGPRGNASNAAPSASPRNASAPRTTPTPPQPRKATKSKASTAKPAPPPKTGPPKTSSEPVRCNRHDPLARYGSRVQIRCRFPNSTRTESRLQIWRYATATDAEIGTAPSLEEVMVNVSAPPGGQLVYDSAPNRTDPHVIWAEGAGPGASPRLYSVVGPLGRQRLIIEELTLETQGMYYWVWGRTDRPSAYGTWVRVRVFRPPSLTIHPHAVLEGQPFKATCTAATYYPGNRAEFVWFEDGRRVFDPAQIHTQTQENPDGFSTVSTVTSAAVGGQGPPRTFTCQLTWHRDSVSFSRRNASGTASVLPRPTITMEFTGDHAVCTAGCVPEGVTFAWFLGDDSSPAEKVAVASQTSCGRPGTATIRSTLPVSYEQTEYICRLAGYPDGIPVLEHHGSHQPPPRDPTERQVIRAVEG

SEQ ID NO: 206 - protein, 339 aa, synthetic construct
  REGION 1..339: note = Synthetic Polypeptide
MGRLTSGVGTAALLVVAVGLRVVCAKYALADPSLKMADPNRFRGKNLPVLDQLTDPPGVKRVYHIQPSLEDPFQPPSIPITVYYAVLERACRSVLLHAPSEAPQIVRGASDEARKHTYNLTIAWYRMGDNCAIPITVMEYTECPYNKSLGVCPIRTQPRWSYYDSFSAVSEDNLGFLMHAPAFETAGTYLRLVKINDWTEITQFILEHRARASCKYALPLRIPPAACLTSKAYQQGVTVDSIGMLPRFIPENQRTVALYSLKIAGWHGPKPPYTSTLLPPELSDTTNATQPELVPEDPEDSALLEDPAGTVSSQIPPNWHIPSIQDVAPHHAPAAPSNP

SEQ ID NO: 207 - protein, 417 aa, synthetic construct
  REGION 1..417: note = Synthetic Polypeptide
MARGAGLVFFVGVWVVSCLAAAPRTSWKRVTSGEDVVLLPAPAGPEERTRAHKLLWAAEPLDACGPLRPSWVALWPPRRVLETVVDAACMRAPEPLAIAYSPPFPAGDEGLYSELAWRDRVAVVNESLVIYGALETDSGLYTLSVVGLSDEARQVASVVLVVEPAPVPTPTPDDYDEEDDAGVSERTPVSVPPPTPPRRPPVAPPTHPRVIPEVSHVRGVTVHMETPEAILFAPGETFGTNVSIHAIAHDDGPYAMDVVWMRFDVPSSCAEMRIYEACLYHPQLPECLSPADAPCAVSSWAYRLAVRSYAGCSRTTPPPRCFAEARMEPVPGLAWLASTVNLEFQHASPQHAGLYLCVVYVDDHIHAWGHMTISTAAQYRNAVVEQHLPQRQPEPVEPTRPHVRAPPPAPSARGPLR

SEQ ID NO: 208 - protein, 262 aa, synthetic construct
  REGION 1..262: note = Synthetic Polypeptide
MPGRSLQGLAILGLWVCATGLVVRGPTVSLVSDSLVDAGAVGPQGFVEEDLRVFGELHFVGAQVPHTNYYDGIIELFHYPLGNHCPRVVHVVTLTACPRRPAVAFTLCRSTHHAHSPAYPTLELGLARQPLLRVRTATRDYAGLYVLRVWVGSATNASLFVLGVALSANGTFVYNGSDYGSCDPAQLPFSAPRLGPSSVYTPGASRPTPPRTTTSPSSPRDPTPAPGDTGTPAPASGERAPPNSTRSASESRHRLTVAQVIQ

SEQ ID NO: 209 - protein, 1294 aa, synthetic construct
  REGION 1..1294: note = Synthetic Polypeptide
MSAEQRKKKKTTTTTQGRGAEVAMADEDGGRLRAAAETTGGPGSPDPADGPPPTPNPDRRPAARPGFGWHGGPEENEDEADDAAADADADEAAPASGEAVDEPAADGVVSPRQLALLASMVDEAVRTIPSPPPERDGAQEEAARSPSPPRTPSMRADYGEENDDDDDDDDDDDRDAGRWVRGPETTSAVRGAYPDPMASLSPRPPAPRRHHHHHHHRRRRAPRRRSAASDSSKSGSSSSASSASSSASSSSSASASSSDDDDDDDAARAPASAADHAAGGTLGADDEEAGVPARAPGAAPRPSPPRAEPAPARTPAATAGRLERRRARAAVAGRDATGRFTAGRPRRVELDADAASGAFYARYRDGYVSGEPWPGAGPPPPGRVLYGGLGDSRPGLWGAPEAEEARARFEASGAPAPVWAPELGDAAQQYALITRLLYTPDAEAMGWLQNPRVAPGDVALDQACFRISGAARNSSSFISGSVARAVPHLGYAMAAGRFGWGLAHVAAAVAMSRRYDRAQKGFLLTSLRRAYAPLLARENAALTGARTPDDGGDANRHDGDDARGKPAAAAAPLPSAAASPADERAVPAGYGAAGVLAALGRLSAAPASAPAGADDDDDDDGAGGGGGGRRAEAGRVAVECLAACRGILEALAEGFDGDLAAVPGLAGARPAAPPRPGPAGAAAPPHADAPRLRAWLRELRFVRDALVLMRLRGDLRVAGGSEAAVAAVRAVSLVAGALGPALPRSPRLLSSAAAAAADLLFQNQSLRPLLADTVAAADSLAAPASAPREAADAPRPAAAPPAGAAPPAPPTPPPRPPRPAALTRRPAEGPDPQGGWRRQPPGPSHTPAPSAAALEAYCAPRAVAELTDHPLFPAPWRPALMFDPRALASLAARCAAPPPGGAPAAFGPLRASGPLRRAAAWMRQVPDPEDVRVVILYSPLPGEDLAAGRAGGGPPPEWSAERGGLSCLLAALGNRLCGPATAAWAGNWTGAPDVSALGAQGVLLLSTRDLAFAGAVEFLGLLAGACDRRLIVVNAVRAAAWPAAAPVVSRQHAYLACEVLPAVQCAVRWPAARDLRRTVLASGRVFGPGVFARVEAAHARLYPDAPPLRLCRGANVRYRVRTRFGPDTLVPMSPREYRRAVLPALDGRAAASGAGDAMAPGAPDFCEDEAHSHRACARWGLGAPLRPVYVALGRDAVRGGPAELRGPRREFCARALLEPDGDAPPLVLRDDADAGPPPQIRWASAAGRAGTVLAAAGGGVEVVGTAAGLATPPRREPVDMDAELEDDDDGLFGE

SEQ ID NO: 210 - DNA, 2917 bp, synthetic construct
  misc_feature 1..2917: note = Synthetic Polynucleotide
  source 1..2917: mol_type = other DNA
tcaagcttttggaccctcgtacagaagctaatacgactcactatagggaaataagagagaaaagaagagtaagaagaaatataagagccaccatgagaggtggtggcttagtttgcgcgctggttgtcggggcgctcgtagccgccgtggcgtcggccgcccctgcggctcctcgcgctagcggaggcgtagccgcaacagttgcggcgaacgggggtccagcctctcagcctcctcccgtcccgagccctgcgaccaccaaggctagaaagcggaagaccaagaaaccgcccaagcgccccgaggccaccccgccccccgatgccaacgcgactgtcgccgctggccatgcgacgcttcgcgctcatctgagggagatcaaggttgaaaatgctgatgcccaattttacgtgtgcccgcccccgacgggcgccacggttgtgcagtttgaacagccgcggcgctgtccgacgcggccagaaggccagaactatacggagggcatagcggtggtctttaaggaaaacatcgccccgtacaaatttaaggccacaatgtactacaaagacgtgacagtttcgcaagtgtggtttggccacagatactcgcagtttatgggaatcttcgaagatagagcccctgttcccttcgaggaagtcatcgacaagattaatgccaaaggggtatgccgttccacggccaaatacgtgcgcaacaatatggagaccaccgcctttcaccgggatgatcacgagaccgacatggagcttaagccggcgaaggtcgccacgcgtacctcccggggttggcacaccacagatcttaagtacaatccctcgcgagttgaagcattccatcggtatggaactaccgttaactgcatcgttgaggaggtggatgcgcggtcggtgtacccttacgatgagtttgtgttagcgaccggcgattttgtgtacatgtccccgttttacggctaccgggaggggtcgcacaccgaacatacctcgtacgccgctgacaggttcaagcaggtcgatggcttttacgcgcgcgatctcaccacgaaggcccgggccacgtcaccgacgaccaggaacttgctcacgacccccaagttcaccgtcgcttgggattgggtcccaaagcgtccggcggtctgcacgatgaccaaatggcaggaggtggacgaaatgctccgcgcagaatacggcggctccttccgcttctcgtccgacgccatctcgacaaccttcaccaccaatctgacccagtacagtctgtcgcgcgttgatttaggagactgcattggccgggatgcccgggaggccatcgacagaatgtttgcgcgtaagtacaatgccacacatattaaggtgggccagccgcaatactaccttgccacgggcggctttctcatcgcgtaccagccccttctctcaaatacgctcgctgaactgtacgtgcgggagtatatgagggaacaggaccgcaagccccgcaatgccacgcctgcgccactacgagaggcgccttcagctaatgcgtcggtggaacgtatcaagaccacctcctcaatagagttcgcccggctgcaatttacgtacaaccacatccagcgccacgtgaacgacatgctgggccgcatcgctgtcgcctggtgcgagctgcagaatcacgagctgactctttggaacgaggcccgaaaactcaaccccaacgcgatcgcctccgcaacagtcggtagacgggtgagcgctcgcatgctaggagatgtcatggctgtgtccacctgcgtgcccgtcgctccggacaacgtgattgtgcagaattcgatgcgggtctcatcgcggccgggcacctgctacagcaggcccctcgtcagcttccggtacgaagaccagggcccgctgattgaagggcaactgggagagaacaatgagctgcgcctcacccgcgacgcgctcgaaccctgcaccgtcggacatcggagatatttcatcttcggagggggctacgtgtacttcgaagagtatgcctactctcaccagctgagtagagccgacgtcactaccgtcagcacctttattgacctgaatatcaccatgctggaggaccacgagtttgtgcccctggaagtttacactcgccacgaaatcaaagactccggcctgttggattacacggaggttcagaggcggaaccagctgcatgacctgcgctttgccgacatcgacaccgtcatccgcgccgatgccaacgctgccatgttcgcggggctgtgcgcgttcttcgaggggatgggtgacttggggcgcgccgtcggcaaggtcgtcatgggagtagtggggggcgttgtgagtgccgtcagcggcgtgtcctccttcatgtccaatccattcggagcgcttgctgtggggctgctggtcctggccgggctggtagccgccttcttcgcctttcgatatgttctgcaactgcaacgcaatcccatgaaagctctatatccgctcaccaccaaggagctaaagacgtcagatccaggaggcgtgggcggggaaggggaagagggcgcggagggcggagggtttgacgaagccaaattggccgaggctcgtgaaatgatccgatatatggcactagtgtcggcgatggaaaggaccgaacataaggcccgaaagaagggcacgtcggcgctgctctcatccaaggtcaccaacatggtactgcgcaagcgcaacaaagccaggtactctccgctccataacgaggacgaggcgggagatgaggatgagctctaatgataataggctggagcctcggtggccatgcttcttgccccttgggcctccccccagcccctcctccccttcctgcacccgtacccccgtggtctttgaataaagtctgagtgggcggc

SEQ ID NO: 211 - DNA, 1654 bp, synthetic construct; identical to SEQ ID NO: 158
  misc_feature 1..1654: note = Synthetic Polynucleotide
  source 1..1654: mol_type = other DNA

SEQ ID NO: 212 - DNA, 1393 bp, synthetic construct; identical to SEQ ID NO: 159
  misc_feature 1..1393: note = Synthetic Polynucleotide
  source 1..1393: mol_type = other DNA

SEQ ID NO: 213 - DNA, 1858 bp, synthetic construct; identical to SEQ ID NO: 160
  misc_feature 1..1858: note = Synthetic Polynucleotide
  source 1..1858: mol_type = other DNA

SEQ ID NO: 214 - DNA, 1330 bp, synthetic construct; identical to SEQ ID NO: 161
  misc_feature 1..1330: note = Synthetic Polynucleotide
  source 1..1330: mol_type = other DNA

SEQ ID NO: 215 - DNA, 2515 bp, synthetic construct; identical to SEQ ID NO: 162
  misc_feature 1..2515: note = Synthetic Polynucleotide
  source 1..2515: mol_type = other DNA

SEQ ID NO: 216 - DNA, 1552 bp, synthetic construct
  misc_feature 1..1552: note = Synthetic Polynucleotide
  source 1..1552: mol_type = other DNA
tcaagcttttggaccctcgtacagaagctaatacgactcactatagggaaataagagagaaaagaagagtaagaagaaatataagagccaccatggcactgggaagagtgggattggccgtcggactgtggggactgctgtgggtgggagtcgtcgtcgtcctggctaacgcctcacccggtcggactatcactgtgggacccagggggaacgcctctaacgccgcgccctcagctagccccaggaatgccagcgctcccaggaccaccccgactcctccgcaaccccgcaaggcgaccaagtccaaggcgtccactgccaagccagcgcctccgcctaagactggcccccctaagacctccagcgaacctgtgcggtgcaaccggcacgaccctctggcacgctacggatcgcgggtccaaatccggtgtcggttcccgaacagcactcggaccgaatcgcggctccagatttggagatacgcaactgccactgatgccgagatcggcactgccccaagccttgaggaggtcatggtcaacgtgtcagctcctcctggaggccagctggtgtacgactccgctccgaaccgaaccgacccgcacgtcatctgggccgaaggagccggtcctggtgcatcgccgaggttgtactcggtagtgggtcccctggggagacagcggctgatcatcgaagaactgactctggagactcagggcatgtactattgggtgtggggcagaaccgatagaccatccgcatacggaacctgggtgcgcgtgagagtgttcagacccccgtccttgacaatccacccgcatgcggtgctcgaagggcagcccttcaaggccacttgcactgcggccacttactaccctggaaaccgggccgaattcgtgtggttcgaggatggacggagggtgttcgacccggcgcagattcatacgcagactcaggaaaacccggacggcttctccaccgtgtccactgtgacttcggccgctgtgggaggacaaggaccgccacgcaccttcacctgtcagctgacctggcaccgcgacagcgtgtcctttagccggcggaacgcatcaggcactgcctccgtgttgcctcgcccaaccattaccatggagttcaccggagatcacgccgtgtgcactgctggctgcgtccccgaaggcgtgaccttcgcctggtttctcggggacgactcatccccggcggaaaaggtggccgtggcctctcagaccagctgcggtagaccgggaaccgccaccatccgctccactctgccggtgtcgtacgagcagaccgagtacatttgtcgcctggccggatacccggacggtatcccagtgctcgaacaccacggcagccatcagcctccgccgagagatcctaccgagcgccaggtcatccgggccgtggaaggatgataataggctggagcctcggtggccatgcttcttgccccttgggcctccccccagcccctcctccccttcctgcacccgtacccccgtggtctttgaataaagtctgagtgggcggc

SEQ ID NO: 217 - DNA, 1462 bp, synthetic construct; identical to SEQ ID NO: 164
  misc_feature 1..1462: note = Synthetic Polynucleotide
  source 1..1462: mol_type = other DNA

SEQ ID NO: 218 - DNA, 997 bp, synthetic construct; identical to SEQ ID NO: 166
  misc_feature 1..997: note = Synthetic Polynucleotide
  source 1..997: mol_type = other DNA

SEQ ID NO: 219 - DNA, 1228 bp, synthetic construct; identical to SEQ ID NO: 167
  misc_feature 1..1228: note = Synthetic Polynucleotide
  source 1..1228: mol_type = other DNA

SEQ ID NO: 220 - DNA, 2473 bp, synthetic construct
  misc_feature 1..2473: note = Synthetic Polynucleotide
  source 1..2473: mol_type = other DNA
tcaagcttttggaccctcgtacagaagctaatacgactcactatagggaaataagagagaaaagaagagtaagaagaaatataagagccaccatggaaccgcggcctggtacttcatcccgcgccgatcctggaccggaacggccacctcgccagacccctggaacgcagcctgcagcccctcacgcctgggggatgctgaatgatatgcagtggctggcctcaagcgactccgaggaagagacagaggtcggcatctccgacgatgatctccatcgggattctacttcggaagcgggctccaccgacacagagatgttcgaggccggcctgatggatgctgcgacccctcccgcaagaccgcctgccgaacgccaaggctcgccgacccctgctgacgcccagggttcgtgcggtggaggccctgtgggggaggaggaagctgaagccggaggcggtggagatgtcaacaccccggtggcctacctgatcgtgggcgtgactgccagcggatccttctcgaccatccccattgtcaacgatccccgcactcgggtcgaagcggaggccgcagtgcgggctggaactgccgtggacttcatttggactggcaatcccaggaccgctccccggtcactgtccctgggaggacacaccgtccgcgccctgtcaccaactcccccgtggcctggaaccgatgacgaggacgacgacctggccgatgtggactacgtgccccctgccccaagacgggctccacggagaggaggcggaggcgccggtgccaccaggggcaccagccaacccgctgccacccggcctgctcctcctggggccccgagatcctcctcatccggcggggcacctctgagagcaggagtgggctcaggctccggaggaggacccgccgtggcagctgtggtcccgcgagtggcctccttgcctccggccgcaggaggcggccgggcccaggccagaagggtgggggaggacgcggcagccgccgaagggcgcactcctccagcgcgccaaccaagagcagcgcaagagcctccgatcgtgatctccgatagccccccaccgtcacctcgcagaccagccggacccgggcctctgtcgttcgtgagctccagctcggcccaggtgtcgagcggacctggcggtggtggactccctcagagcagcggcagagctgccagacctcgcgccgccgtggccccgagggtcaggtcgccgccgagagcagctgccgccccagtggtgtccgcctcagccgacgccgccggtcccgcgcctcctgctgtgccagtggacgcccatagagcgccgcggagcagaatgactcaggcacagactgacacccaggcccagtcgctcggtagggctggagccaccgacgccagaggatcgggcggacccggagccgaaggagggtccggtcccgccgcttcctcctccgcgtcctcatcagccgctccgcgctcaccgctcgcaccccagggtgtcggagcaaagcgagcagctcctcgccgggcccctgactccgactcaggagatcggggccacggaccactcgcgcctgccagcgctggagcggctcctccatcggcttccccatcctcgcaagcagccgtggccgccgcatcctcaagctcggcgtcctctagctcagcgagctcctccagcgcctcgtcctcgtccgcctccagcagctcagcctcctcgtcctcggcctcctcatcgtccgcctcctcctccgctggaggtgccggaggatcggtcgcatccgcttccggcgcaggggagcgccgagaaacgtccctgggtccgcgggcagctgctccgaggggtcctcgcaagtgcgcgcggaaaactcggcacgcggagggaggaccggaacctggcgcgagagatcctgcgcctggactgacccggtacctccccattgccggggtgtccagcgtggtggcacttgccccgtacgtcaacaagaccgtgaccggggactgtctccccgtgctcgacatggagactggacacattggcgcgtatgtggtcctggtggatcagaccggtaatgtggccgaccttttgagagcagcggccccagcatggtcccgcagaaccctgctgcctgagcacgccaggaattgcgtgcggccgccggactacccgactccgcccgccagcgaatggaactcactgtggatgactcccgtgggcaacatgctgttcgatcaggggaccctggtcggagccctggattttcacggcctgcgctccagacatccgtggtctagggaacagggtgctcctgctcccgcgggtgatgcccctgctggccacggcgaatagtgataataggctggagcctcggtggccatgcttcttgccccttgggcctccccccagcccctcctccccttcctgcacccgtacccccgtggtctttgaataaagtctgagtgggcggc

SEQ ID NO: 221 - DNA, 4096 bp, synthetic construct
  misc_feature 1..4096: note = Synthetic Polynucleotide
  source 1..4096: mol_type = other DNA
tcaagcttttggaccctcgtacagaagctaatacgactcactatagggaaataagagagaaaagaagagtaagaagaaatataagagccaccatgtcggccgagcagcgcaagaagaagaaaacgaccaccactacccagggcagaggagccgaagtcgccatggccgatgaagatggcgggaggctgcgggccgccgctgaaaccaccggaggaccgggatcccctgaccctgcggacggcccacctcccacaccgaacccggacagacggcctgctgcaaggcccggtttcggatggcacgggggacccgaagagaacgaggacgaagccgatgacgccgcggcggatgcagacgccgacgaggcggctcccgcttcgggagaagcggtggacgaaccggccgccgatggagtggtcagcccccgccagctcgcgctgctcgcgtccatggtggatgaagccgtgagaactatcccctcacctccgccggaacgggatggagctcaagaggaagccgccagaagcccgtcccctccgagaactccatccatgcgggccgactacggcgaagagaatgacgacgatgatgacgacgatgatgacgatgaccgcgatgccggacggtgggtccgcggacctgagactacctccgccgtgcgcggagcctaccctgatccgatggcctcacttagcccccggccacccgccccccgccgccaccaccaccatcatcaccaccgcagaagaagggctcccaggcgcagatcagcagcttccgacagctcgaagtccggctcctcgtcctccgccagcagcgcatcctcgtcagcgtcctcatcgtccagcgcctcggcgagctcctccgacgatgacgacgacgacgatgccgccagagctccggcatcagccgcggaccatgccgccggaggaaccctcggtgccgacgacgaggaggccggcgtgcctgcccgcgctccgggagctgctcctaggccttcaccaccccgggcggagccagcccctgccagaacgccagcagccaccgctgggcgattggagaggcggagagcccgggccgccgtggccggtcgggatgccaccggccgcttcactgccggacgccctcggcgcgtcgaactggacgcagacgccgcctcgggcgcgttctacgcccgctatcgggacggttatgtgtccggcgagccttggcctggtgccggtcctcctccgcctgggagagtgctctacgggggtctgggtgattctcggccagggttgtggggagcccccgaggcggaggaagccagagcccgcttcgaagcatccggagcaccggcccctgtgtgggcgccggaactgggcgacgccgcccaacaatacgccctgatcacacgcctgctctacactccggacgccgaagccatgggctggctgcagaacccgagagtggccccgggtgatgtggccctggaccaggcatgcttcaggattagcggagccgcgagaaactcgagcagctttatctcaggatctgtggcccgagccgtgccgcacctgggctacgcgatggccgccggacgcttcggatgggggctggcccatgtcgctgccgcggtggcgatgtcccggcggtacgaccgggctcagaagggtttcctcctcaccagcctccggagggcatacgccccgttgctggctcgggagaacgccgctctgactggcgcccgcactcctgatgacggtggcgacgccaaccgccacgacggcgacgatgcacggggaaagcccgcggccgccgccgccccccttcctagcgcagccgcttcgcctgccgacgaacgggctgtccctgccggatacggagccgccggtgtgctggcggcccttgggagactgtcagccgcgcctgcttcagcgccggccggagccgacgatgacgacgacgacgatggagccggaggagggggcggcggtcggagagcagaagccggcagggtggcagtcgaatgccttgctgcctgtcgcgggatcctcgaggcgttggccgaaggcttcgacggcgacctggcggcagtgcctggcctggccggcgcccgccccgctgcccctccacggcccggtccggccggggccgcagcccctccgcatgctgacgcgcctcgcctcagagcatggctgagagaattgagatttgtgcgggatgcgctggtccttatgcgcctgaggggggatctgagggtggccggaggttccgaggcggccgtggctgctgtgcgggccgtgtccctggtggccggtgcgctgggtcccgctctgccgcggtcccctagattgctttcctcagcggccgccgccgcagccgatctgctctttcagaaccaaagcctcaggccgctgctggccgacactgtcgccgctgcggactccctcgctgccccagcctcggccccaagagaggctgccgatgcccctcgccccgccgcggccccgcctgccggagcagcgccgcctgcaccccctactccccccccgcgaccgccacgcccagccgctcttaccagaaggccagctgagggtcctgacccgcagggcggctggcgcagacagcccccgggaccttcccacactcccgccccatctgcggctgcccttgaagcatactgtgccccgagagctgtggcggagctgaccgaccaccctctgttccctgcaccttggcggcctgccctgatgtttgacccgagagcgttggcctccctggcggccagatgtgcggccccgcctcccggaggagccccagctgcattcggacctctgcgggcatccggaccactgcggcgcgctgctgcatggatgcggcaagtgccggaccctgaggacgttcgcgtggtcattctttactcccccctgccgggagaagatctcgccgccggccgcgcgggaggaggccctccacccgagtggtccgctgaacggggaggcctgtcctgcctgctggctgccctgggaaaccgcctgtgcggaccagctactgccgcctgggctggaaactggaccggcgcacccgatgtgtcagccctcggagcgcagggagtgctgctgctgtcaactcgcgacctggcattcgccggagctgtggagttcctgggtctgcttgccggcgcgtgcgaccggagattgatcgtcgtgaacgctgtcagagcggccgcttggcctgccgctgctccggtggtcagccggcagcacgcatatctggcctgcgaggtgctgcccgccgtgcagtgtgccgtgcggtggccagcggccagagacttgcgacggaccgtgctggcctccggtagggtctttggccccggagtgttcgcccgcgtggaggccgcccatgccagactgtaccccgacgcaccgcccctgagactgtgccggggagccaacgtgcggtacagagtccgcacccgcttcggacccgatactctggtgccaatgtcaccgcgggaatataggagagccgtgctcccggcactggacggcagagccgccgcatccggtgctggggacgcgatggcacccggagcccccgacttttgcgaggatgaagcccacagccatcgggcctgtgccagatggggcctgggtgcccctcttcgccccgtgtacgtggccctggggagagatgccgtccgcggtggaccagccgagctgagaggcccacgccgggaattttgcgctcgggccctgctcgagcccgatggagatgcgcctccccttgtgctgcgcgacgacgctgacgccggcccacctccgcaaatccggtgggccagcgccgccggtcgagcaggaacggtgttggcagcagccggaggaggagtcgaagtggtcggaaccgcggctggactggcaaccccgccaaggcgcgaacctgtggatatggacgccgagctggaggatgacgacgatggccttttcggcgagtgatgataataggctggagcctcggtggccatgcttcttgccccttgggcctccccccagcccctcctccccttcctgcacccgtacccccgtggtctttgaataaagtctgagtgggcggc

SEQ ID NO: 222 - protein, 901 aa, synthetic construct; identical to SEQ ID NO: 198
  REGION 1..901: note = Synthetic Polypeptide

SEQ ID NO: 223 - protein, 480 aa, synthetic construct; identical to SEQ ID NO: 180
  REGION 1..480: note = Synthetic Polypeptide

SEQ ID NO: 224 - protein, 393 aa, synthetic construct; identical to SEQ ID NO: 195
  REGION 1..393: note = Synthetic Polypeptide

SEQ ID NO: 225 - protein, 548 aa, synthetic construct; identical to SEQ ID NO: 201
  REGION 1..548: note = Synthetic Polypeptide

SEQ ID NO: 226 - protein, 372 aa, synthetic construct; identical to SEQ ID NO: 202
  REGION 1..372: note = Synthetic Polypeptide

SEQ ID NO: 227 - protein, 768 aa, synthetic construct; identical to SEQ ID NO: 204
  REGION 1..768: note = Synthetic Polypeptide

SEQ ID NO: 228 - protein, 447 aa, synthetic construct; identical to SEQ ID NO: 205
  REGION 1..447: note = Synthetic Polypeptide

SEQ ID NO: 229 - protein, 417 aa, synthetic construct; identical to SEQ ID NO: 207
  REGION 1..417: note = Synthetic Polypeptide

SEQ ID NO: 230 - protein, 262 aa, synthetic construct; identical to SEQ ID NO: 208
  REGION 1..262: note = Synthetic Polypeptide

SEQ ID NO: 231 - protein, 339 aa, synthetic construct; identical to SEQ ID NO: 206
  REGION 1..339: note = Synthetic Polypeptide

SEQ ID NO: 232 - protein, 753 aa, synthetic construct; identical to SEQ ID NO: 203
  REGION 1..753: note = Synthetic Polypeptide

SEQ ID NO: 233 - protein, 1294 aa, synthetic construct; identical to SEQ ID NO: 209
  REGION 1..1294: note = Synthetic Polypeptide

SEQ ID NO: 234 - RNA, 1961 nt, Human herpesvirus 2
  source 1..1961: mol_type = mRNA
tcaagcttttggaccctcgtacagaagctaatacgactcactatagggaaataagagagaaaagaagagtaagaagaaatataagagccaccatgagaggtggtggcttagtttgcgcgctggttgtcggggcgctcgtagccgccgtggcgtcggccgcccctgcggctcctcgcgctagcggaggcgtagccgcaacagttgcggcgaacgggggtccagcctctcagcctcctcccgtcccgagccctgcgaccaccaaggctagaaagcggaagaccaagaaaccgcccaagcgccccgaggccaccccgccccccgatgccaacgcgactgtcgccgctggccatgcgacgcttcgcgctcatctgagggagatcaaggttgaaaatgctgatgcccaattttacgtgtgcccgcccccgacgggcgccacggttgtgcagtttgaacagccgcggcgctgtccgacgcggccagaaggccagaactatacggagggcatagcggtggtctttaaggaaaacatcgccccgtacaaatttaaggccacaatgtactacaaagacgtgacagtttcgcaagtgtggtttggccacagatactcgcagtttatgggaatcttcgaagatagagcccctgttcccttcgaggaagtcatcgacaagattaatgccaaaggggtatgccgttccacggccaaatacgtgcgcaacaatatggagaccaccgcctttcaccgggatgatcacgagaccgacatggagcttaagccggcgaaggtcgccacgcgtacctcccggggttggcacaccacagatcttaagtacaatccctcgcgagttgaagcattccatcggtatggaactaccgttaactgcatcgttgaggaggtggatgcgcggtcggtgtacccttacgatgagtttgtgttagcgaccggcgattttgtgtacatgtccccgttttacggctaccgggaggggtcgcacaccgaacatacctcgtacgccgctgacaggttcaagcaggtcgatggcttttacgcgcgcgatctcaccacgaaggcccgggccacgtcaccgacgaccaggaacttgctcacgacccccaagttcaccgtcgcttgggattgggtcccaaagcgtccggcggtctgcacgatgaccaaatggcaggaggtggacgaaatgctccgcgcagaatacggcggctccttccgcttctcgtccgacgccatctcgacaaccttcaccaccaatctgacccagtacagtctgtcgcgcgttgatttaggagactgcattggccgggatgcccgggaggccatcgacagaatgtttgcgcgtaagtacaatgccacacatattaaggtgggccagccgcaatactaccttgccacgggcggctttctcatcgcgtaccagccccttctctcaaatacgctcgctgaactgtacgtgcgggagtatatgagggaacaggaccgcaagccccgcaatgccacgcctgcgccactacgagaggcgccttcagctaatgcgtcggtggaacgtatcaagaccacctcctcaatagagttcgcccggctgcaatttacgtacaaccacatccagcgccacgtgaacgacatgctgggccgcatcgctgtcgcctggtgcgagctgcagaatcacgagctgactctttggaacgaggcccgaaaactcaaccccaacgcgatcgcctccgcaacagtcggtagacgggtgagcgctcgcatgctaggagatgtcatggctgtgtccacctgcgtgcccgtcgctccggacaacgtgattgtgcagaattcgatgcgggtcttgataataggctggagcctcggtggccatgcttcttgccccttgggcctccccccagcccctcctccccttcctgcacccgtacccccgtggtctttgaataaagtctgagtgggcggc

SEQ ID NO: 235 - RNA, 1654 nt, Human herpesvirus 2
  source 1..1654: mol_type = mRNA
tcaagcttttggaccctcgtacagaagctaatacgactcactatagggaaataagagagaaaagaagagtaagaagaaatataagagccaccatggcccttggacgggtaggcctagccgtgggcctgtggggcctactgtgggtgggtgtggtcgtggtgctggccaatgcctcccccggacgcacgataacggtgggcccgcgaggcaacgcgagcaatgctgccccctccgcgtccccgcggaacgcatccgccccccgaaccacacccacgcccccacaaccccgcaaagcgacgaaatccaaggcctccaccgccaaaccggctccgccccccaagaccggacccccgaagacatcctcggagcccgtgcgatgcaaccgccacgacccgctggcccggtacggctcgcgggtgcaaatccgatgccggtttcccaactccacgaggactgagtcccgtctccagatctggcgttatgccacggcgacggacgccgaaatcggaacagcgcctagcttagaagaggtgatggtgaacgtgtcggccccgcccgggggccaactggtgtatgacagtgcccccaaccgaacggacccgcatgtaatctgggcggagggcgccggcccgggcgccagcccgcgcctgtactcggttgtcggcccgctgggtcggcagcggctcatcatcgaagagttaaccctggagacacagggcatgtactattgggtgtggggccggacggaccgcccgtccgcctacgggacctgggtccgcgttcgagtatttcgccctccgtcgctgaccatccacccccacgcggtgctggagggccagccgtttaaggcgacgtgcacggccgcaacctactacccgggcaaccgcgcggagttcgtctggtttgaggacggtcgccgcgtattcgatccggcacagatacacacgcagacgcaggagaaccccgacggcttttccaccgtctccaccgtgacctccgcggccgtcggcgggcagggcccccctcgcaccttcacctgccagctgacgtggcaccgcgactccgtgtcgttctctcggcgcaacgccagcggcacggcctcggttctgccgcggccgaccattaccatggagtttacaggcgaccatgcggtctgcacggccggctgtgtgcccgagggggtcacgtttgcttggttcctgggggatgactcctcgccggcggaaaaggtggccgtcgcgtcccagacatcgtgcgggcgccccggcaccgccacgatccgctccaccctgccggtctcgtacgagcagaccgagtacatctgtagactggcgggatacccggacggaattccggtcctagagcaccacggaagccaccagcccccgccgcgggacccaaccgagcggcaggtgatccgggcggtggagggggcggggatcggagtggctgtccttgtcgcggtggttctggccgggaccgcggtagtgtacctgacccatgcctcctcggtacgctatcgtcggctgcggtaatgataataggctggagcctcggtggccatgcttcttgccccttgggcctccccccagcccctcctccccttcctgcacccgtacccccgtggtctttgaataaagtctgagtgggcggc

SEQ ID NO: 236 - RNA, 1393 nt, Human herpesvirus 2
  source 1..1393: mol_type = mRNA
tcaagcttttggaccctcgtacagaagctaatacgactcactatagggaaataagagagaaaagaagagtaagaagaaatataagagccaccatggggcgtttgacctccggcgtcgggacggcggccctgctagttgtcgcggtgggactccgcgtcgtctgcgccaaatacgccttagcagacccctcgcttaagatggccgatcccaatcgatttcgcgggaagaaccttccggttttggaccagctgaccgacccccccggggtgaagcgtgtttaccacattcagccgagcctggaggacccgttccagccccccagcatcccgatcactgtgtactacgcagtgctggaacgtgcctgccgcagcgtgctcctacatgccccatcggaggccccccagatcgtgcgcggggcttcggacgaggcccgaaagcacacgtacaacctgaccatcgcctggtatcgcatgggagacaattgcgctatccccatcacggttatggaatacaccgagtgcccctacaacaagtcgttgggggtctgccccatccgaacgcagccccgctggagctactatgacagctttagcgccgtcagcgaggataacctgggattcctgatgcacgcccccgccttcgagaccgcgggtacgtacctgcggctagtgaagataaacgactggacggagatcacacaatttatcctggagcaccgggcccgcgcctcctgcaagtacgctctccccctgcgcatccccccggcagcgtgcctcacctcgaaggcctaccaacagggcgtgacggtcgacagcatcgggatgctaccccgctttatccccgaaaaccagcgcaccgtcgccctatacagcttaaaaatcgccgggtggcacggccccaagcccccgtacaccagcaccctgctgccgccggagctgtccgacaccaccaacgccacgcaacccgaactcgttccggaagaccccgaggactcggccctcttagaggatcccgccgggacggtgtcttcgcagatccccccaaactggcacatcccgtcgatccaggacgtcgcaccgcaccacgcccccgccgcccccagcaacccgggcctgatcatcggcgcgctggccggcagtaccctggcggtgctggtcatcggcggtattgcgttttgggtacgccgccgcgctcagatggcccccaagcgcctacgtctcccccacatccgggatgacgacgcgcccccctcgcaccagccattgttttactagtgataataggctggagcctcggtggccatgcttcttgccccttgggcctccccccagcccctcctccccttcctgcacccgtacccccgtggtctttgaataaagtctgagtgggcggc

SEQ ID NO: 237 - RNA, 1858 nt, Human herpesvirus 2
  source 1..1858: mol_type = mRNA
tcaagcttttggaccctcgtacagaagctaatacgactcactatagggaaataagagagaaaagaagagtaagaagaaatataagagccaccatggctaggggggccgggttggttttttttgttggagtttgggtcgtaagctgcctcgcggcagcgcccagaacgtcctggaaacgcgtaacctcgggcgaagacgtggtgttactccccgcgccggcggggccggaagaacgcactcgggcccacaaactactgtgggcagcggaaccgctggatgcctgcggtcccctgaggccgtcatgggtggcactgtggcccccccgacgagtgcttgagacggttgtcgatgcggcgtgcatgcgcgccccggaaccgctcgctatcgcatacagtcccccgttccctgcgggcgacgagggactttattcggagttggcgtggcgcgatcgcgtagccgtggtcaacgagagtttagttatctacggggccctggagacggacagtggtctgtacaccctgtcagtggtgggcctatccgacgaggcccgccaagtggcgtccgtggttctcgtcgtcgagcccgcccctgtgcctaccccgacccccgatgactacgacgaggaggatgacgcgggcgtgagcgaacgcacgcccgtcagcgttccccccccaacacccccccgacgtccccccgtcgcccccccgacgcaccctcgtgttatccctgaggtgagccacgtgcggggggtgacggtccacatggaaaccccggaggccattctgtttgcgccaggggagacgtttgggacgaacgtctccatccacgcaattgcccacgacgacggtccgtacgccatggacgtcgtctggatgcgatttgatgtcccgtcctcgtgcgccgagatgcggatctatgaagcatgtctgtatcacccgcagctgcctgagtgtctgtctccggccgatgcgccgtgcgccgtaagttcgtgggcgtaccgcctggcggtccgcagctacgccggctgctccaggactacgcccccacctcgatgttttgctgaagctcgcatggaaccggtccccgggttggcgtggctcgcatcaactgttaatctggaattccagcatgcctctccccaacacgccggcctctatctgtgtgtggtgtatgtggacgaccatatccatgcctggggccacatgaccatctccacagcggcccagtaccggaatgcggtggtggaacagcatctcccccagcgccagcccgagcccgtagaacccacccgaccgcatgtgagagccccccctcccgcaccctccgcgagaggcccgttacgcttaggtgcggtcctgggggcggccctgttgctcgcggccctcgggctatccgcctgggcgtgcatgacctgctggcgcaggcgcagttggcgggcggttaaaagtcgggcctcggcgaccggccccacttacattcgagtagcggatagcgagctgtacgcggactggagttcggactcagagggcgagcgcgacggttccctgtggcaggaccctccggagagacccgactcaccgtccacaaatggatccggctttgagatcttatccccaacggcgccctctgtatacccccatagcgaagggcgtaaatcgcgccgcccgctcaccacctttggttcaggaagcccgggacgtcgtcactcccaggcgtcctattcttccgtcttatggtaatgataataggctggagcctcggtggccatgcttcttgccccttgggcctccccccagcccctcctccccttcctgcacccgtacccccgtggtctttgaataaagtctgagtgggcggc

SEQ ID NO: 238 - RNA, 1330 nt, Human herpesvirus 2
  source 1..1330: mol_type = mRNA
tcaagcttttggaccctcgtacagaagctaatacgactcactatagggaaataagagagaaaagaagagtaagaagaaatataagagccaccatgcccggccgctcgctgcagggcctggcgatcctgggcctgtgggtctgcgccaccggcctggtcgtccgcggccccacggtcagtctggtctcagactcactcgtggatgccggggccgtggggccccagggcttcgtggaagaggacctgcgtgttttcggggagcttcattttgtgggggcccaggtcccccacacaaactactacgacggcatcatcgagctgtttcactaccccctggggaaccactgcccccgcgttgtacacgtggtcacactgaccgcatgcccccgccgccccgccgtggcgttcaccttgtgtcgctcgacgcaccacgcccacagccccgcctatccgaccctggagctgggtctggcgcggcagccgcttctgcgggttcgaacggcaacgcgcgactatgccggtctgtatgtcctgcgcgtatgggtcggcagcgcgacgaacgccagcctgtttgttttgggggtggcgctctctgccaacgggacgtttgtgtataacggctcggactacggctcctgcgatccggcgcagcttcccttttcggccccgcgcctgggaccctcgagcgtatacacccccggagcctcccggcccacccctccacggacaacgacatcaccgtcctccccacgagacccgacccccgcccccggggacacagggacgcctgctcccgcgagcggcgagagagccccgcccaattccacgcgatcggccagcgaatcgagacacaggctaaccgtagcccaggtaatccagatcgccataccggcgtccatcatcgcctttgtgtttctgggcagctgtatctgcttcatccatagatgccagcgccgatacaggcgcccccgcggccagatttacaaccccgggggcgtttcctgcgcggtcaacgaggcggccatggcccgcctcggagccgagctgcgatcccacccaaacaccccccccaaaccccgacgccgttcgtcgtcgtccacgaccatgccttccctaacgtcgatagctgaggaatcggagccaggtccagtcgtgctgctgtccgtcagtcctcggccccgcagtggcccgacggccccccaagaggtctagtgataataggctggagcctcggtggccatgcttcttgccccttgggcctccccccagcccctcctccccttcctgcacccgtacccccgtggtctttgaataaagtctgagtgggcggc

SEQ ID NO: 239 - RNA, 2515 nt, Human herpesvirus 2
  source 1..2515: mol_type = mRNA
tcaagcttttggaccctcgtacagaagctaatacgactcactatagggaaataagagagaaaagaagagtaagaagaaatataagagccaccatgcgcggggggggcttagtttgcgcgctggtcgtgggggcgctcgtagccgcggtcgcgtcggcggctccggctgccccacgcgcttcaggtggtgtcgctgcgaccgttgcggcgaatggtggtcccgccagccaaccgcctcccgtcccgagccccgcgaccactaaggcccggaagcggaagaccaagaagccacccaagcggcccgaggcgactccgcccccagacgccaacgcgaccgtcgccgccggccacgccactctgcgtgcgcacctgcgggaaatcaaggtcgagaacgcggacgcccagttttacgtgtgcccgccgccgactggcgccacggtggtgcagtttgagcaacctaggcgctgcccgacgcgaccagaggggcagaactacaccgagggcatagcggtggtctttaaggaaaacatcgccccgtacaaattcaaggccaccatgtactacaaagacgtgaccgtgtcgcaggtgtggttcggccaccgctactcccagtttatggggatattcgaggaccgcgcccccgttcccttcgaagaggtgattgacaaaattaacgccaagggggtctgccgcagtacggcgaagtacgtccggaacaacatggagaccactgccttccaccgggacgaccacgaaacagacatggagctcaaaccggcgaaagtcgccacgcgcacgagccgggggtggcacaccaccgacctcaaatacaatccttcgcgggtggaagcattccatcggtatggcacgaccgtcaactgtatcgtagaggaggtggatgcgcggtcggtgtacccctacgatgagttcgtgctggcaacgggcgattttgtgtacatgtcccctttttacggctaccgggaaggtagtcacaccgagcacaccagttacgccgccgaccgctttaagcaagtggacggcttctacgcgcgcgacctcaccacaaaggcccgggccacgtcgccgacgacccgcaatttgctgacgacccccaagtttaccgtggcctgggactgggtgcctaagcgaccggcggtctgtaccatgacaaagtggcaggaggtggacgaaatgctccgcgctgaatacggtggctctttccgcttctcttccgacgccatctccaccacgttcaccaccaacctgacccaatactcgctctcgagagtcgatctgggagactgcattggccgggatgcccgcgaggcaattgaccgcatgttcgcgcgcaagtacaacgctacgcacataaaggttggccaaccccagtactacctagccacggggggcttcctcatcgcttatcaacccctcctcagcaacacgctcgccgagctgtacgtgcgggaatatatgcgggaacaggaccgcaaaccccgaaacgccacgcccgcgccgctgcgggaagcaccgagcgccaacgcgtccgtggagcgcatcaagacgacatcctcgattgagtttgctcgtctgcagtttacgtataaccacatacagcgccatgtaaacgacatgctcgggcgcatcgccgtcgcgtggtgcgagctccaaaatcacgagctcactctgtggaacgaggcacgcaagctcaatcccaacgccatcgcatccgccaccgtaggccggcgggtgagcgctcgcatgctcggggatgtcatggccgtctccacgtgcgtgcccgtcgccccggacaacgtgatcgtgcaaaatagcatgcgcgtttcttcgcggccggggacgtgctacagccgcccgctggttagctttcggtacgaagaccaaggcccgctgattgaggggcagctgggtgagaacaacgagctgcgcctcacccgcgatgcgttagagccgtgtaccgtcggccaccggcgctacttcatcttcggagggggatacgtatacttcgaagaatatgcgtactctcaccaattgagtcgcgccgatgtcaccactgttagcaccttcatcgacctgaacatcaccatgctggaggaccacgagttcgtgcccctggaggtctacacacgccacgagatcaaggattccggcctactggactacaccgaagtccagagacgaaatcagctgcacgatctccgctttgctgacatcgatactgttatccgcgccgacgccaacgccgccatgttcgcaggtctgtgtgcgtttttcgagggtatgggtgacttagggcgcgcggtgggcaaggtcgtcatgggggtagtcgggggcgtggtgtcggccgtctcgggcgtctcctcctttatgtctaacccctgataataggctggagcctcggtggccatgcttcttgccccttgggcctccccccagcccctcctccccttcctgcacccgtacccccgtggtctttgaataaagtctgagtgggcggc

SEQ ID NO: 240 - RNA, 1552 nt, Human herpesvirus 2
  source 1..1552: mol_type = mRNA
tcaagcttttggaccctcgtacagaagctaatacgactcactatagggaaataagagagaaaagaagagtaagaagaaatataagagccaccatggcccttggacgggtgggcctagccgtgggcctgtggggcctgctgtgggtgggtgttgtcgtggtgctggccaatgcctcccctggacgcacgataacggtgggcccgcgggggaacgcgagcaatgccgccccatccgcgtccccgcggaacgcatccgccccccgaaccacacccactcccccccaaccccgcaaagcgacgaaaagtaaggcctccaccgccaaaccggccccgccccccaagaccgggcccccgaagacatcttctgagcccgtgcgctgcaaccgccacgacccgctggcccggtacggctcgcgggtgcaaatccgatgtcgatttcccaactccactcgcacggaatcccgcctccagatctggcgttatgccacggcgacggacgccgagattggaactgcgcctagcttagaggaggtgatggtaaacgtgtcggccccgcccgggggccaactggtgtatgatagcgcacctaaccgaacggacccgcacgtgatttgggcggagggcgccggacctggcgcctcaccgcggctgtactcggtcgtcgggccgctgggtcggcagagacttatcatcgaagagctgaccctcgagacacagggcatgtattattgggtgtggggccggacggaccgcccgtccgcgtacgggacctgggtgcgcgttcgcgtgttccgccctccttcgctgaccatccacccccacgcggtgctggagggccagccgtttaaagcgacgtgcaccgccgccacctactacccgggcaaccgcgcggagttcgtctggttcgaggacggtcgccgggtattcgatccggcccagatacatacgcagacgcaggaaaaccccgacggcttttccaccgtctccaccgtgacctccgcggccgtcggcggccagggccccccgcgcaccttcacctgtcagctgacgtggcaccgcgactccgtgtcgttctctcggcgcaatgccagcggcacggcatcggtgctgccacggccaaccattaccatggagtttacgggcgaccatgcggtctgcacggccggctgtgtgcccgagggggtgacgtttgcctggttcctgggggacgactcctcgccggccgagaaggtggccgtcgcgtcccagacctcgtgcggtcgccccggcaccgccacgatccgctccacactgccggtctcgtacgagcagaccgagtacatctgccggctggcgggatacccggacggaattccggtcctagagcaccatggcagccaccagcccccgccgcgggaccccaccgaacggcaggtgattcgggcagtggaagggtgataataggctggagcctcggtggccatgcttcttgccccttgggcctccccccagcccctcctccccttcctgcacccgtacccccgtggtctttgaataaagtctgagtgggcggc

SEQ ID NO: 241 - RNA, 1462 nt, Human herpesvirus 2
  source 1..1462: mol_type = mRNA
tcaagcttttggaccctcgtacagaagctaatacgactcactatagggaaataagagagaaaagaagagtaagaagaaatataagagccaccatggctcgcggggccgggttggtgttttttgttggagtttgggtcgtatcgtgcctggcggcagcacccagaacgtcctggaaacgggttacctcgggcgaggacgtggtgttgcttccggcgcccgcggggccggaggaacgcacacgggcccacaaactactgtgggccgcggaacccctggatgcctgcggtcccctgaggccgtcgtgggtggcgctgtggcccccgcgacgggtgctcgaaacggtcgtggatgcggcgtgcatgcgcgccccggaaccgctcgccatagcatacagtcccccgttccccgcgggcgacgagggactgtattcggagttggcgtggcgcgatcgcgtagccgtggtcaacgagagtctggtcatctacggggccctggagacggacagcggtctgtacaccctgtccgtggtcggcctaagcgacgaggcgcgccaagtggcgtcggtggttctggtcgtggagcccgcccctgtgccgaccccgacccccgacgactacgacgaagaagacgacgcgggcgtgagcgaacgcacgccggtcagcgtaccccccccgaccccaccccgtcgtccccccgtcgccccccctacgcaccctcgtgttatccccgaggtgtcccacgtgcgcggggtaacggtccatatggagaccccggaggccattctgtttgcccccggagagacgtttgggacgaacgtctccatccacgccattgcccatgacgacggtccgtacgccatggacgtcgtctggatgcggtttgacgtgccgtcctcgtgcgccgagatgcggatctacgaagcttgtctgtatcacccgcagcttccagaatgtctatctccggccgacgcgccgtgcgctgtaagttcctgggcgtaccgcctggcggtccgcagctacgccggctgttccaggactacgcccccgccgcgatgttttgccgaggctcgcatggaaccggtcccggggttggcgtggttagcctccaccgtcaacctggaattccagcacgcctcccctcagcacgccggcctttacctgtgcgtggtgtacgtggacgatcatatccacgcctggggccacatgaccatctctaccgcggcgcagtaccggaacgcggtggtggaacagcacttgccccagcgccagcctgaacccgtcgagcccacccgcccgcacgtaagagcaccccctcccgcgccttccgcgcgcggcccgctgcgctgataataggctggagcctcggtggccatgcttcttgccccttgggcctccccccagcccctcctccccttcctgcacccgtacccccgtggtctttgaataaagtctgagtgggcggc

SEQ ID NO: 242 - RNA, 4096 nt, Human herpesvirus 2
  source 1..4096: mol_type = mRNA
tcaagcttttggaccctcgtacagaagctaatacgactcactatagggaaataagagagaaaagaagagtaagaagaaatataagagccaccatgtcggcggagcagcggaagaagaagaagacgacgacgacgacgcagggccgcggggccgaggtcgcgatggcggacgaggacgggggacgtctccgggccgcggcggagacgaccggcggccccggatctccggatccagccgacggaccgccgcccaccccgaacccggaccgtcgccccgccgcgcggcccgggttcgggtggcacggtgggccggaggagaacgaagacgaggccgacgacgccgccgccgatgccgatgccgacgaggcggccccggcgtccggggaggccgtcgacgagcctgccgcggacggcgtcgtctcgccgcggcagctggccctgctggcctcgatggtggacgaggccgttcgcacgatcccgtcgccccccccggagcgcgacggcgcgcaagaagaagcggcccgctcgccttctccgccgcggaccccctccatgcgcgccgattatggcgaggagaacgacgacgacgacgacgacgacgatgacgacgaccgcgacgcgggccgctgggtccgcggaccggagacgacgtccgcggtccgcggggcgtacccggaccccatggccagcctgtcgccgcgacccccggcgccccgccgacaccaccaccaccaccaccaccgccgccggcgcgccccccgccggcgctcggccgcctctgactcatcaaaatccggatcctcgtcgtcggcgtcctccgcctcctcctccgcctcctcctcctcgtctgcatccgcctcctcgtctgacgacgacgacgacgacgacgccgcccgcgcccccgccagcgccgcagaccacgccgcgggcgggaccctcggcgcggacgacgaggaggcgggggtgcccgcgagggccccgggggcggcgccccggccgagcccgcccagggccgagcccgccccggcccggacccccgcggcgaccgcgggccgcctggagcgccgccgggcccgcgcggcggtggccggccgcgacgccacgggccgcttcacggccgggcggccccggcgggtcgagctggacgccgacgcggcctccggcgccttctacgcgcgctaccgcgacgggtacgtcagcggggagccgtggcccggggccggccccccgcccccggggcgcgtgctgtacggcgggctgggcgacagccgccccggcctctggggggcgcccgaggcggaggaggcgcgggcccggttcgaggcctcgggcgccccggcgcccgtgtgggcgcccgagctgggcgacgcggcgcagcagtacgccctgatcacgcggctgctgtacacgccggacgcggaggcgatggggtggctccagaacccgcgcgtggcgcccggggacgtggcgctggaccaggcctgcttccggatctcgggcgcggcgcgcaacagcagctccttcatctccggcagcgtggcgcgggccgtgccccacctggggtacgccatggcggcgggccgcttcggctggggcctggcgcacgtggcggccgccgtggccatgagccgccgctacgaccgcgcgcagaagggcttcctgctgaccagcctgcgccgcgcctacgcgcccctgctggcgcgcgagaacgcggcgctgaccggggcgcgaacccccgacgacggcggcgacgccaaccgccacgacggcgacgacgcccgcgggaagcccgccgccgccgccgccccgttgccgtcggcggcggcgtcgccggccgacgagcgcgcggtgcccgccggctacggcgccgcgggggtgctcgccgccctggggcgcctgagcgccgcgcccgcctccgcgccggccggggccgacgacgacgacgacgacgacggcgccggcggtggtggcggcggccggcgcgcggaggcgggccgcgtggccgtggagtgcctggccgcctgccgcgggatcctggaggcgctggcggagggcttcgacggcgacctggcggccgtgccggggctggccggagcccggcccgccgcgcccccgcgcccggggcccgcgggcgcggccgccccgccgcacgccgacgcgccccgcctgcgcgcctggctgcgcgagctgcggttcgtgcgcgacgcgctggtgctgatgcgcctgcgcggggacctgcgcgtggccggcggcagcgaggccgccgtggccgccgtgcgcgccgtgagcctggtcgccggggccctgggcccggcgctgccgcggagcccgcgcctgctgagctccgccgccgccgccgccgcggacctgctcttccagaaccagagcctgcgccccctgctggccgacaccgtcgccgcggccgactcgctcgccgcgcccgcctccgcgccgcgggaggccgcggacgccccccgccccgcggccgcccctcccgcgggggccgcgccccccgccccgccgacgccgccgccgcggccgccgcgccccgcggcgctgacccgccggcccgccgagggccccgacccgcagggcggctggcgccgccagccgccggggcccagccacacgccggcgccctcggccgccgccctggaggcctactgcgccccgcgggccgtggccgagctcacggaccacccgctcttccccgcgccgtggcgcccggccctcatgttcgacccgcgcgcgctggcctcgctggccgcgcgctgcgccgccccgccccccggcggcgcgcccgccgccttcggcccgctgcgcgcctcgggcccgctgcgccgcgcggcggcctggatgcgccaggtgcccgacccggaggacgtgcgcgtggtgatcctctactcgccgctgccgggcgaggacctggccgcgggccgcgccgggggcgggccccccccggagtggtccgccgagcgcggcgggctgtcctgcctgctggcggccctgggcaaccggctctgcgggcccgccacggccgcctgggcgggcaactggaccggcgcccccgacgtctcggcgctgggcgcgcagggcgtgctgctgctgtccacgcgggacctggccttcgccggcgccgtggagttcctggggctgctggccggcgcctgcgaccgccgcctcatcgtcgtcaacgccgtgcgcgccgcggcctggcccgccgctgcccccgtggtctcgcggcagcacgcctacctggcctgcgaggtgctgcccgccgtgcagtgcgccgtgcgctggccggcggcgcgggacctgcgccgcaccgtgctggcctccggccgcgtgttcgggccgggggtcttcgcgcgcgtggaggccgcgcacgcgcgcctgtaccccgacgcgccgccgctgcgcctctgccgcggggccaacgtgcggtaccgcgtgcgcacgcgcttcggccccgacacgctggtgcccatgtccccgcgcgagtaccgccgcgccgtgctcccggcgctggacggccgggccgccgcctcgggcgcgggcgacgccatggcgcccggcgcgccggacttctgcgaggacgaggcgcactcgcaccgcgcctgcgcgcgctggggcctgggcgcgccgctgcggcccgtctacgtggcgctggggcgcgacgccgtgcgcggcggcccggcggagctgcgcgggccgcggcgggagttctgcgcgcgggcgctgctcgagcccgacggcgacgcgcccccgctggtgctgcgcgacgacgcggacgcgggcccgcccccgcagatacgctgggcgtcggccgcgggccgcgcggggacggtgctggccgcggcgggcggcggcgtggaggtggtggggaccgccgcggggctggccacgccgccgaggcgcgagcccgtggacatggacgcggagctggaggacgacgacgacggactgtttggggagtgatgataataggctggagcctcggtggccatgcttcttgccccttgggcctccccccagcccctcctccccttcctgcacccgtacccccgtggtctttgaataaagtctgagtgggcggc

SEQ ID NO: 243 - RNA, 997 nt, Human herpesvirus 2
  source 1..997: mol_type = mRNA
tcaagcttttggaccctcgtacagaagctaatacgactcactatagggaaataagagagaaaagaagagtaagaagaaatataagagccaccatgcccggccgctcgctgcagggcctggcgatcctgggcctgtgggtctgcgccaccggcctggtcgtccgcggccccacggtcagtctggtctcagactcactcgtggatgccggggccgtggggccccagggcttcgtggaagaggacctgcgtgttttcggggagcttcattttgtgggggcccaggtcccccacacaaactactacgacggcatcatcgagctgtttcactaccccctggggaaccactgcccccgcgttgtacacgtggtcacactgaccgcatgcccccgccgccccgccgtggcgttcaccttgtgtcgctcgacgcaccacgcccacagccccgcctatccgaccctggagctgggtctggcgcggcagccgcttctgcgggttcgaacggcaacgcgcgactatgccggtctgtatgtcctgcgcgtatgggtcggcagcgcgacgaacgccagcctgtttgttttgggggtggcgctctctgccaacgggacgtttgtgtataacggctcggactacggctcctgcgatccggcgcagcttcccttttcggccccgcgcctgggaccctcgagcgtatacacccccggagcctcccggcccacccctccacggacaacgacatccccgtcctcccctagagacccgacccccgcccccggggacacaggaacgcctgcgcccgcgagcggcgagagagccccgcccaattccacgcgatcggccagcgaatcgagacacaggctaaccgtagcccaggtaatccagtgataataggctggagcctcggtggccatgcttcttgccccttgggcctccccccagcccctcctccccttcctgcacccgtacccccgtggtctttgaataaagtctgagtgggcggc

SEQ ID NO: 244 - RNA, 1228 nt, Human herpesvirus 2
  source 1..1228: mol_type = mRNA
tcaagcttttggaccctcgtacagaagctaatacgactcactatagggaaataagagagaaaagaagagtaagaagaaatataagagccaccatggggcgtttgacctccggcgtcgggacggcggccctgctagttgtcgcggtgggactccgcgtcgtctgcgccaaatacgccttagcagacccctcgcttaagatggccgatcccaatcgatttcgcgggaagaaccttccggttttggaccagctgaccgacccccccggggtgaagcgtgtttaccacattcagccgagcctggaggacccgttccagccccccagcatcccgatcactgtgtactacgcagtgctggaacgtgcctgccgcagcgtgctcctacatgccccatcggaggccccccagatcgtgcgcggggcttcggacgaggcccgaaagcacacgtacaacctgaccatcgcctggtatcgcatgggagacaattgcgctatccccatcacggttatggaatacaccgagtgcccctacaacaagtcgttgggggtctgccccatccgaacgcagccccgctggagctactatgacagctttagcgccgtcagcgaggataacctgggattcctgatgcacgcccccgccttcgagaccgcgggtacgtacctgcggctagtgaagataaacgactggacggagatcacacaatttatcctggagcaccgggcccgcgcctcctgcaagtacgctctccccctgcgcatccccccggcagcgtgcctcacctcgaaggcctaccaacagggcgtgacggtcgacagcatcgggatgctaccccgctttatccccgaaaaccagcgcaccgtcgccctatacagcttaaaaatcgccgggtggcacggccccaagcccccgtacaccagcaccctgctgccgccggagctgtccgacaccaccaacgccacgcaacccgaactcgttccggaagaccccgaggactcggccctcttagaggatcccgccgggacggtgtcttcgcagatccccccaaactggcacatcccgtcgatccaggacgtcgcgccgcaccacgcccccgccgcccccagcaacccgtgataataggctggagcctcggtggccatgcttcttgccccttgggcctccccccagcccctcctccccttcctgcacccgtacccccgtggtctttgaataaagtctgagtgggcggc

SEQ ID NO: 245 - RNA, 2706 nt, Human herpesvirus 2
  source 1..2706: mol_type = mRNA
atgcgcggggggggcttggtttgcgcgctggtcgtgggggcgctggtggccgcggtggcgtcggcggccccggcggccccccgcgcctcgggcggcgtggccgcgaccgtcgcggcgaacgggggtcccgcctcccagccgccccccgtcccgagccccgcgaccaccaaggcccggaagcggaaaaccaaaaagccgcccaagcggcccgaggcgaccccgccccccgacgccaacgcgaccgtcgccgccggccacgccacgctgcgcgcgcacctgcgggaaatcaaggtcgagaacgccgatgcccagttttacgtgtgcccgcccccgacgggcgccacggtggtgcagtttgagcagccgcgccgctgcccgacgcgcccggaggggcagaactacacggagggcatcgcggtggtcttcaaggagaacatcgccccgtacaaattcaaggccaccatgtactacaaagacgtgaccgtgtcgcaggtgtggttcggccaccgctactcccagtttatggggatattcgaggaccgcgcccccgttcccttcgaggaggtgatcgacaagattaacgccaagggggtctgccgctccacggccaagtacgtgcggaacaacatggagaccaccgcgtttcaccgggacgaccacgagaccgacatggagctcaagccggcgaaggtcgccacgcgcacgagccgggggtggcacaccaccgacctcaagtacaacccctcgcgggtggaggcgttccatcggtacggcacgacggtcaactgcatcgtcgaggaggtggacgcgcggtcggtgtacccgtacgatgagtttgtgctggcgacgggcgactttgtgtacatgtccccgttttacggctaccgggaggggtcgcacaccgagcacaccagctacgccgccgaccgcttcaagcaggtcgacggcttctacgcgcgcgacctcaccacgaaggcccgggccacgtcgccgacgacccgcaacttgctgacgacccccaagtttaccgtggcctgggactgggtgccgaagcgaccggcggtctgcaccatgaccaagtggcaggaggtggacgagatgctccgcgccgagtacggcggctccttccgcttctcctccgacgccatctcgaccaccttcaccaccaacctgacccagtactcgctctcgcgcgtcgacctgggcgactgcatcggccgggatgcccgcgaggccatcgaccgcatgtttgcgcgcaagtacaacgccacgcacatcaaggtgggccagccgcagtactacctggccacggggggcttcctcatcgcgtaccagcccctcctcagcaacacgctcgccgagctgtacgtgcgggagtacatgcgggagcaggaccgcaagccccggaatgccacgcccgcgccactgcgggaggcgcccagcgccaacgcgtccgtggagcgcatcaagaccacctcctcgatcgagttcgcccggctgcagtttacgtataaccacatacagcgccacgtgaacgacatgctggggcgcatcgccgtcgcgtggtgcgagctgcagaaccacgagctgactctctggaacgaggcccgcaagctcaaccccaacgccatcgcctccgccaccgtcggccggcgggtgagcgcgcgcatgctcggagacgtcatggccgtctccacgtgcgtgcccgtcgccccggacaacgtgatcgtgcagaactcgatgcgcgtcagctcgcggccggggacgtgctacagccgccccctggtcagctttcggtacgaagaccagggcccgctgatcgaggggcagctgggcgagaacaacgagctgcgcctcacccgcgacgcgctcgagccgtgcaccgtgggccaccggcgctacttcatcttcggcgggggctacgtgtacttcgaggagtacgcgtactctcaccagctgagtcgcgccgacgtcaccaccgtcagcaccttcatcgacctgaacatcaccatgctggaggaccacgagtttgtgcccctggaggtctacacgcgccacgagatcaaggacagcggcctgctggactacacggaggtccagcgccgcaaccagctgcacgacctgcgctttgccgacatcgacacggtcatccgcgccgacgccaacgccgccatgttcgcggggctgtgcgcgttcttcgaggggatgggggacttggggcgcgcggtcggcaaggtcgtcatgggagtagtggggggcgtggtgtcggccgtctcgggcgtgtcctcctttatgtccaaccccttcggggcgcttgccgtggggctgctggtcctggccggcctggtcgcggccttcttcgccttccgctacgtcctgcaactgcaacgcaatcccatgaaggccctgtatccgctcaccaccaaggaactcaagacttccgaccccgggggcgtgggcggggagggggaggaaggcgcggaggggggcgggtttgacgaggccaagttggccgaggcccgagaaatgatccgatatatggctttggtgtcggccatggagcgcacggaacacaaggccagaaagaagggcacgagcgccctgctcagctccaaggtcaccaacatggttctgcgcaagcgcaacaaagccaggtactctccgctccacaacgaggacgaggccggagacgaagacgagctctaa

SEQ ID NO: 246 - RNA, 1443 nt, Human herpesvirus 2
  source 1..1443: mol_type = mRNA
atggcccttggacgggtgggcctagccgtgggcctgtggggcctgctgtgggtgggtgtggtcgtggtgctggccaatgcctcccccggacgcacgataacggtgggcccgcgggggaacgcgagcaatgccgccccctccgcgtccccgcggaacgcatccgccccccgaaccacacccacgcccccccaaccccgcaaggcgacgaaaagtaaggcctccaccgccaaaccggccccgccccccaagaccgggcccccgaagacatcctcggagcccgtgcgatgcaaccgccacgacccgctggcccggtacggctcgcgggtgcaaatccgatgccggtttcccaactccacccgcacggagtcccgcctccagatctggcgttatgccacggcgacggacgccgagatcggaacggcgcctagcttagaggaggtgatggtaaacgtgtcggccccgcccgggggccaactggtgtatgacagcgcccccaaccgaacggacccgcacgtgatctgggcggagggcgccggcccgggcgccagcccgcggctgtactcggtcgtcgggccgctgggtcggcagcggctcatcatcgaagagctgaccctggagacccagggcatgtactactgggtgtggggccggacggaccgcccgtccgcgtacgggacctgggtgcgcgttcgcgtgttccgccctccgtcgctgaccatccacccccacgcggtgctggagggccagccgtttaaggcgacgtgcacggccgccacctactacccgggcaaccgcgcggagttcgtctggttcgaggacggtcgccgggtattcgatccggcccagatacacacgcagacgcaggagaaccccgacggcttttccaccgtctccaccgtgacctccgcggccgtcggcggccagggccccccgcgcaccttcacctgccagctgacgtggcaccgcgactccgtgtcgttctctcggcgcaacgccagcggcacggcatcggtgctgccgcggccaaccattaccatggagtttacgggcgaccatgcggtctgcacggccggctgtgtgcccgagggggtgacgtttgcctggttcctgggggacgactcctcgccggcggagaaggtggccgtcgcgtcccagacatcgtgcgggcgccccggcaccgccacgatccgctccaccctgccggtctcgtacgagcagaccgagtacatctgccggctggcgggatacccggacggaattccggtcctagagcaccacggcagccaccagcccccgccgcgggaccccaccgagcggcaggtgatccgggcggtggagggggcggggatcggagtggctgtccttgtcgcggtggttctggccgggaccgcggtagtgtacctcacccacgcctcctcggtgcgctatcgtcggctgcggtaa

SEQ ID NO: 247 - RNA, 1182 nt, Human herpesvirus 2
  source 1..1182: mol_type = mRNA
atggggcgtttgacctccggcgtcgggacggcggccctgctagttgtcgcggtgggactccgcgtcgtctgcgccaaatacgccttagcagacccctcgcttaagatggccgatcccaatcgatttcgcgggaagaaccttccggttttggaccagctgaccgacccccccggggtgaagcgtgtttaccacattcagccgagcctggaggacccgttccagccccccagcatcccgatcactgtgtactacgcagtgctggaacgtgcctgccgcagcgtgctcctacatgccccatcggaggccccccagatcgtgcgcggggcttcggacgaggcccgaaagcacacgtacaacctgaccatcgcctggtatcgcatgggagacaattgcgctatccccatcacggttatggaatacaccgagtgcccctacaacaagtcgttgggggtctgccccatccgaacgcagccccgctggagctactatgacagctttagcgccgtcagcgaggataacctgggattcctgatgcacgcccccgccttcgagaccgcgggtacgtacctgcggctagtgaagataaacgactggacggagatcacacaatttatcctggagcaccgggcccgcgcctcctgcaagtacgctctccccctgcgcatccccccggcagcgtgcctcacctcgaaggcctaccaacagggcgtgacggtcgacagcatcgggatgctaccccgctttatccccgaaaaccagcgcaccgtcgccctatacagcttaaaaatcgccgggtggcacggccccaagcccccgtacaccagcaccctgctgccgccggagctgtccgacaccaccaacgccacgcaacccgaactcgttccggaagaccccgaggactcggccctcttagaggatcccgccgggacggtgtcttcgcagatccccccaaactggcacatcccgtcgatccaggacgtcgcgccgcaccacgcccccgccgcccccagcaacccgggcctgatcatcggcgcgctggccggcagtaccctggcggtgctggtcatcggcggtattgcgttttgggtacgccgccgcgctcagatggcccccaagcgcctacgtctcccccacatccgggatgacgacgcgcccccctcgcaccagccattgttttactag

SEQ ID NO: 248 - RNA, 1647 nt, Human herpesvirus 2
  source 1..1647: mol_type = mRNA
atggctcgcggggccgggttggtgttttttgttggagtttgggtcgtatcgtgcctggcggcagcacccagaacgtcctggaaacgggtaacctcgggcgaggacgtggtgttgcttccggcgcccgcggggccggaggaacgcacccgggcccacaaactactgtgggccgcggaacccctggatgcctgcggtcccctgcgcccgtcgtgggtggcgctgtggcccccccgacgggtgctcgagacggtcgtggatgcggcgtgcatgcgcgccccggaaccgctcgccatagcatacagtcccccgttccccgcgggcgacgagggactgtattcggagttggcgtggcgcgatcgcgtagccgtggtcaacgagagtctggtcatctacggggccctggagacggacagcggtctgtacaccctgtccgtggtcggcctaagcgacgaggcgcgccaagtggcgtcggtggttctggtcgtggagcccgcccctgtgccgaccccgacccccgacgactacgacgaagaagacgacgcgggcgtgagcgaacgcacgccggtcagcgttccccccccaacccccccccgtcgtccccccgtcgcccccccgacgcaccctcgtgttatccccgaggtgtcccacgtgcgcggggtaacggtccatatggagaccccggaggccattctgtttgcccccggggagacgtttgggacgaacgtctccatccacgccattgcccacgacgacggtccgtacgccatggacgtcgtctggatgcggtttgacgtgccgtcctcgtgcgccgagatgcggatctacgaagcttgtctgtatcacccgcagcttccagagtgtctatctccggccgacgcgccgtgcgccgtaagttcctgggcgtaccgcctggcggtccgcagctacgccggctgttccaggactacgcccccgccgcgatgttttgccgaggctcgcatggaaccggtcccggggttggcgtggctggcctccaccgtcaatctggaattccagcacgcctccccccagcacgccggcctctacctgtgcgtggtgtacgtggacgatcatatccacgcctggggccacatgaccatcagcaccgcggcgcagtaccggaacgcggtggtggaacagcacctcccccagcgccagcccgagcccgtcgagcccacccgcccgcacgtgagagccccccctcccgcgccctccgcgcgcggcccgctgcgcctcggggcggtgctgggggcggccctgttgctggccgccctcgggctgtccgcgtgggcgtgcatgacctgctggcgcaggcgctcctggcgggcggttaaaagccgggcctcggcgacgggccccacttacattcgcgtggcggacagcgagctgtacgcggactggagttcggacagcgagggggagcgcgacgggtccctgtggcaggaccctccggagagacccgactctccctccacaaatggatccggctttgagatcttatcaccaacggctccgtctgtatacccccatagcgaggggcgtaaatctcgccgcccgctcaccacctttggttcgggaagcccgggccgtcgtcactcccaggcctcctattcgtccgtcctctggtaa

SEQ ID NO: 249 - RNA, 1119 nt, Human herpesvirus 2
  source 1..1119: mol_type = mRNA
atgcccggccgctcgctgcagggcctggcgatcctgggcctgtgggtctgcgccaccggcctggtcgtccgcggccccacggtcagtctggtctcagactcactcgtggatgccggggccgtggggccccagggcttcgtggaagaggacctgcgtgttttcggggagcttcattttgtgggggcccaggtcccccacacaaactactacgacggcatcatcgagctgtttcactaccccctggggaaccactgcccccgcgttgtacacgtggtcacactgaccgcatgcccccgccgccccgccgtggcgttcaccttgtgtcgctcgacgcaccacgcccacagccccgcctatccgaccctggagctgggtctggcgcggcagccgcttctgcgggttcgaacggcaacgcgcgactatgccggtctgtatgtcctgcgcgtatgggtcggcagcgcgacgaacgccagcctgtttgttttgggggtggcgctctctgccaacgggacgtttgtgtataacggctcggactacggctcctgcgatccggcgcagcttcccttttcggccccgcgcctgggaccctcgagcgtatacacccccggagcctcccggcccacccctccacggacaacgacatccccgtcctccccccgagacccgacccccgcccccggggacacagggacgcccgcgcccgcgagcggcgagagagccccgcccaattccacgcgatcggccagcgaatcgagacacaggctaaccgtagcccaggtaatccagatcgccataccggcgtccatcatcgcctttgtgtttctgggcagctgtatctgcttcatccatagatgccagcgccgatacaggcgcccccgcggccagatttacaaccccgggggcgtttcctgcgcggtcaacgaggcggccatggcccgcctcggagccgagctgcgatcccacccaaacaccccccccaaaccccgacgccgttcgtcgtcgtccacgaccatgccttccctaacgtcgatagctgaggaatcggagccaggtccagtcgtgctgctgtccgtcagtcctcggccccgcagtggcccgacggccccccaagaggtctag

SEQ ID NO: 250 - RNA, 2262 nt, synthetic construct
  misc_feature 1..2262: note = Synthetic Polynucleotide
  source 1..2262: mol_type = other RNA
atggaaccccggcccggcacgagctcccgggcggaccccggccccgagcggccgccgcggcagacccccggcacgcagcccgccgccccgcacgcctgggggatgctcaacgacatgcagtggctcgccagcagcgactcggaggaggagaccgaggtgggaatctctgacgacgaccttcaccgcgactccacctccgaggcgggcagcacggacacggagatgttcgaggcgggcctgatggacgcggccacgcccccggcccggcccccggccgagcgccagggcagccccacgcccgccgacgcgcagggatcctgtgggggtgggcccgtgggtgaggaggaagcggaagcgggaggggggggcgacgtgaacaccccggtggcgtacctgatagtgggcgtgaccgccagcgggtcgttcagcaccatcccgatagtgaacgacccccggacccgcgtggaggccgaggcggccgtgcgggccggcacggccgtggactttatctggacgggcaacccgcggacggccccgcgctccctgtcgctggggggacacacggtccgcgccctgtcgcccacccccccgtggcccggcacggacgacgaggacgatgacctggccgacgtggactacgtcccgcccgccccccgaagagcgccccggcgcgggggcggcggtgcgggggcgacccgcggaacctcccagcccgccgcgacccgaccggcgccccctggcgccccgcggagcagcagcagcggcggcgccccgttgcgggcgggggtgggatctgggtctgggggcggccctgccgtcgcggccgtcgtgccgagagtggcctctcttccccctgcggccggcggggggcgcgcgcaggcgcggcgggtgggcgaagacgccgcggcggcggagggcaggacgccccccgcgagacagccccgcgcggcccaggagccccccatagtcatcagcgactctcccccgccgtctccgcgccgccccgcgggccccgggccgctctcctttgtctcctcctcctccgcacaggtgtcctcgggccccggggggggaggtctgccacagtcgtcggggcgcgccgcgcgcccccgcgcggccgtcgccccgcgcgtccggagtccgccccgcgccgccgccgcccccgtggtgtctgcgagcgcggacgcggccgggcccgcgccgcccgccgtgccggtggacgcgcaccgcgcgccccggtcgcgcatgacccaggctcagaccgacacccaagcacagagtctgggccgggcaggcgcgaccgacgcgcgcgggtcgggagggccgggcgcggagggaggatcgggccccgcggcctcgtcctccgcctcttcctccgccgccccgcgctcgcccctcgccccccagggggtgggggccaagagggcggcgccgcgccgggccccggactcggactcgggcgaccgcggccacgggccgctcgccccggcgtccgcgggcgccgcgcccccgtcggcgtctccgtcgtcccaggccgcggtcgccgccgcctcctcctcctccgcctcctcctcctccgcctcctcctcctccgcctcctcctcctccgcctcctcctcctccgcctcctcctcctccgcctcctcctcctccgcctcttcctctgcgggcggggctggtgggagcgtcgcgtccgcgtccggcgctggggagagacgagaaacctccctcggcccccgcgctgctgcgccgcgggggccgaggaagtgtgccaggaagacgcgccacgcggagggcggccccgagcccggggcccgcgacccggcgcccggcctcacgcgctacctgcccatcgcgggggtctcgagcgtcgtggccctggcgccttacgtgaacaagacggtcacgggggactgcctgcccgtcctggacatggagacgggccacataggggcctacgtggtcctcgtggaccagacggggaacgtggcggacctgctgcgggccgcggcccccgcgtggagccgccgcaccctgctccccgagcacgcgcgcaactgcgtgaggccccccgactacccgacgccccccgcgtcggagtggaacagcctctggatgaccccggtgggcaacatgctctttgaccagggcaccctggtgggcgcgctggacttccacggcctccggtcgcgccacccgtggtctcgggagcagggcgcgcccgcgccggccggcgacgcccccgcgggccacggggagtag

SEQ ID NO: 251 - RNA, 2304 nt, Human herpesvirus 2
  source 1..2304: mol_type = mRNA
atgcgcggggggggcttggtttgcgcgctggtcgtgggggcgctggtggccgcggtggcgtcggcggccccggcggccccccgcgcctcgggcggcgtggccgcgaccgtcgcggcgaacgggggtcccgcctcccagccgccccccgtcccgagccccgcgaccaccaaggcccggaagcggaaaaccaaaaagccgcccaagcggcccgaggcgaccccgccccccgacgccaacgcgaccgtcgccgccggccacgccacgctgcgcgcgcacctgcgggaaatcaaggtcgagaacgccgatgcccagttttacgtgtgcccgcccccgacgggcgccacggtggtgcagtttgagcagccgcgccgctgcccgacgcgcccggaggggcagaactacacggagggcatcgcggtggtcttcaaggagaacatcgccccgtacaaattcaaggccaccatgtactacaaagacgtgaccgtgtcgcaggtgtggttcggccaccgctactcccagtttatggggatattcgaggaccgcgcccccgttcccttcgaggaggtgatcgacaagattaacgccaagggggtctgccgctccacggccaagtacgtgcggaacaacatggagaccaccgcgtttcaccgggacgaccacgagaccgacatggagctcaagccggcgaaggtcgccacgcgcacgagccgggggtggcacaccaccgacctcaagtacaacccctcgcgggtggaggcgttccatcggtacggcacgacggtcaactgcatcgtcgaggaggtggacgcgcggtcggtgtacccgtacgatgagtttgtgctggcgacgggcgactttgtgtacatgtccccgttttacggctaccgggaggggtcgcacaccgagcacaccagctacgccgccgaccgcttcaagcaggtcgacggcttctacgcgcgcgacctcaccacgaaggcccgggccacgtcgccgacgacccgcaacttgctgacgacccccaagtttaccgtggcctgggactgggtgccgaagcgaccggcggtctgcaccatgaccaagtggcaggaggtggacgagatgctccgcgccgagtacggcggctccttccgcttctcctccgacgccatctcgaccaccttcaccaccaacctgacccagtactcgctctcgcgcgtcgacctgggcgactgcatcggccgggatgcccgcgaggccatcgaccgcatgtttgcgcgcaagtacaacgccacgcacatcaaggtgggccagccgcagtactacctggccacggggggcttcctcatcgcgtaccagcccctcctcagcaacacgctcgccgagctgtacgtgcgggagtacatgcgggagcaggaccgcaagccccggaatgccacgcccgcgccactgcgggaggcgcccagcgccaacgcgtccgtggagcgcatcaagaccacctcctcgatcgagttcgcccggctgcagtttacgtataaccacatacagcgccacgtgaacgacatgctggggcgcatcgccgtcgcgtggtgcgagctgcagaaccacgagctgactctctggaacgaggcccgcaagctcaaccccaacgccatcgcctccgccaccgtcggccggcgggtgagcgcgcgcatgctcggagacgtcatggccgtctccacgtgcgtgcccgtcgccccggacaacgtgatcgtgcagaactcgatgcgcgtcagctcgcggccggggacgtgctacagccgccccctggtcagctttcggtacgaagaccagggcccgctgatcgaggggcagctgggcgagaacaacgagctgcgcctcacccgcgacgcgctcgagccgtgcaccgtgggccaccggcgctacttcatcttcggcgggggctacgtgtacttcgaggagtacgcgtactctcaccagctgagtcgcgccgacgtcaccaccgtcagcaccttcatcgacctgaacatcaccatgctggaggaccacgagtttgtgcccctggaggtctacacgcgccacgagatcaaggacagcggcctgctggactacacggaggtccagcgccgcaaccagctgcacgacctgcgctttgccgacatcgacacggtcatccgcgccgacgccaacgccgccatgttcgcggggctgtgcgcgttcttcgaggggatgggggacttggggcgcgcggtcggcaaggtcgtcatgggagtagtggggggcgtggtgtcggccgtctcgggcgtgtcctcctttatgtccaacccc

SEQ ID NO: 252 - RNA, 1341 nt, Human herpesvirus 2
  source 1..1341: mol_type = mRNA
atggcccttggacgggtgggcctagccgtgggcctgtggggcctgctgtgggtgggtgtggtcgtggtgctggccaatgcctcccccggacgcacgataacggtgggcccgcgggggaacgcgagcaatgccgccccctccgcgtccccgcggaacgcatccgccccccgaaccacacccacgcccccccaaccccgcaaggcgacgaaaagtaaggcctccaccgccaaaccggccccgccccccaagaccgggcccccgaagacatcctcggagcccgtgcgatgcaaccgccacgacccgctggcccggtacggctcgcgggtgcaaatccgatgccggtttcccaactccacccgcacggagtcccgcctccagatctggcgttatgccacggcgacggacgccgagatcggaacggcgcctagcttagaggaggtgatggtaaacgtgtcggccccgcccgggggccaactggtgtatgacagcgcccccaaccgaacggacccgcacgtgatctgggcggagggcgccggcccgggcgccagcccgcggctgtactcggtcgtcgggccgctgggtcggcagcggctcatcatcgaagagctgaccctggagacccagggcatgtactactgggtgtggggccggacggaccgcccgtccgcgtacgggacctgggtgcgcgttcgcgtgttccgccctccgtcgctgaccatccacccccacgcggtgctggagggccagccgtttaaggcgacgtgcacggccgccacctactacccgggcaaccgcgcggagttcgtctggttcgaggacggtcgccgggtattcgatccggcccagatacacacgcagacgcaggagaaccccgacggcttttccaccgtctccaccgtgacctccgcggccgtcggcggccagggccccccgcgcaccttcacctgccagctgacgtggcaccgcgactccgtgtcgttctctcggcgcaacgccagcggcacggcatcggtgctgccgcggccaaccattaccatggagtttacgggcgaccatgcggtctgcacggccggctgtgtgcccgagggggtgacgtttgcctggttcctgggggacgactcctcgccggcggagaaggtggccgtcgcgtcccagacatcgtgcgggcgccccggcaccgccacgatccgctccaccctgccggtctcgtacgagcagaccgagtacatctgccggctggcgggatacccggacggaattccggtcctagagcaccacggcagccaccagcccccgccgcgggaccccaccgagcggcaggtgatccgggcggtggagggg

SEQ ID NO: 253 - RNA, 1017 nt, Human herpesvirus 2
  source 1..1017: mol_type = mRNA
atggggcgtttgacctccggcgtcgggacggcggccctgctagttgtcgcggtgggactccgcgtcgtctgcgccaaatacgccttagcagacccctcgcttaagatggccgatcccaatcgatttcgcgggaagaaccttccggttttggaccagctgaccgacccccccggggtgaagcgtgtttaccacattcagccgagcctggaggacccgttccagccccccagcatcccgatcactgtgtactacgcagtgctggaacgtgcctgccgcagcgtgctcctacatgccccatcggaggccccccagatcgtgcgcggggcttcggacgaggcccgaaagcacacgtacaacctgaccatcgcctggtatcgcatgggagacaattgcgctatccccatcacggttatggaatacaccgagtgcccctacaacaagtcgttgggggtctgccccatccgaacgcagccccgctggagctactatgacagctttagcgccgtcagcgaggataacctgggattcctgatgcacgcccccgccttcgagaccgcgggtacgtacctgcggctagtgaagataaacgactggacggagatcacacaatttatcctggagcaccgggcccgcgcctcctgcaagtacgctctccccctgcgcatccccccggcagcgtgcctcacctcgaaggcctaccaacagggcgtgacggtcgacagcatcgggatgctaccccgctttatccccgaaaaccagcgcaccgtcgccctatacagcttaaaaatcgccgggtggcacggccccaagcccccgtacaccagcaccctgctgccgccggagctgtccgacaccaccaacgccacgcaacccgaactcgttccggaagaccccgaggactcggccctcttagaggatcccgccgggacggtgtcttcgcagatccccccaaactggcacatcccgtcgatccaggacgtcgcgccgcaccacgcccccgccgcccccagcaacccg

SEQ ID NO: 254 - RNA, 1251 nt, Human herpesvirus 2
  source 1..1251: mol_type = mRNA
atggctcgcggggccgggttggtgttttttgttggagtttgggtcgtatcgtgcctggcggcagcacccagaacgtcctggaaacgggtaacctcgggcgaggacgtggtgttgcttccggcgcccgcggggccggaggaacgcacccgggcccacaaactactgtgggccgcggaacccctggatgcctgcggtcccctgcgcccgtcgtgggtggcgctgtggcccccccgacgggtgctcgagacggtcgtggatgcggcgtgcatgcgcgccccggaaccgctcgccatagcatacagtcccccgttccccgcgggcgacgagggactgtattcggagttggcgtggcgcgatcgcgtagccgtggtcaacgagagtctggtcatctacggggccctggagacggacagcggtctgtacaccctgtccgtggtcggcctaagcgacgaggcgcgccaagtggcgtcggtggttctggtcgtggagcccgcccctgtgccgaccccgacccccgacgactacgacgaagaagacgacgcgggcgtgagcgaacgcacgccggtcagcgttccccccccaacccccccccgtcgtccccccgtcgcccccccgacgcaccctcgtgttatccccgaggtgtcccacgtgcgcggggtaacggtccatatggagaccccggaggccattctgtttgcccccggggagacgtttgggacgaacgtctccatccacgccattgcccacgacgacggtccgtacgccatggacgtcgtctggatgcggtttgacgtgccgtcctcgtgcgccgagatgcggatctacgaagcttgtctgtatcacccgcagcttccagagtgtctatctccggccgacgcgccgtgcgccgtaagttcctgggcgtaccgcctggcggtccgcagctacgccggctgttccaggactacgcccccgccgcgatgttttgccgaggctcgcatggaaccggtcccggggttggcgtggctggcctccaccgtcaatctggaattccagcacgcctccccccagcacgccggcctctacctgtgcgtggtgtacgtggacgatcatatccacgcctggggccacatgaccatcagcaccgcggcgcagtaccggaacgcggtggtggaacagcacctcccccagcgccagcccgagcccgtcgagcccacccgcccgcacgtgagagccccccctcccgcgccctccgcgcgcggcccgctgcgc

SEQ ID NO: 255 - RNA, 786 nt, Human herpesvirus 2
  source 1..786: mol_type = mRNA
atgcccggccgctcgctgcagggcctggcgatcctgggcctgtgggtctgcgccaccggcctggtcgtccgcggccccacggtcagtctggtctcagactcactcgtggatgccggggccgtggggccccagggcttcgtggaagaggacctgcgtgttttcggggagcttcattttgtgggggcccaggtcccccacacaaactactacgacggcatcatcgagctgtttcactaccccctggggaaccactgcccccgcgttgtacacgtggtcacactgaccgcatgcccccgccgccccgccgtggcgttcaccttgtgtcgctcgacgcaccacgcccacagccccgcctatccgaccctggagctgggtctggcgcggcagccgcttctgcgggttcgaacggcaacgcgcgactatgccggtctgtatgtcctgcgcgtatgggtcggcagcgcgacgaacgccagcctgtttgttttgggggtggcgctctctgccaacgggacgtttgtgtataacggctcggactacggctcctgcgatccggcgcagcttcccttttcggccccgcgcctgggaccctcgagcgtatacacccccggagcctcccggcccacccctccacggacaacgacatccccgtcctccccccgagacccgacccccgcccccggggacacagggacgcccgcgcccgcgagcggcgagagagccccgcccaattccacgcgatcggccagcgaatcgagacacaggctaaccgtagcccaggtaatccag

SEQ ID NO: 256 - RNA, 3885 nt, synthetic construct
  misc_feature 1..3885: note = Synthetic Polynucleotide
  source 1..3885: mol_type = other RNA
atgtcggcggagcagcggaagaagaagaagacgacgacgacgacgcagggccgcggggccgaggtcgcgatggcggacgaggacgggggacgtctccgggccgcggcggagacgaccggcggccccggatctccggatccagccgacggaccgccgcccaccccgaacccggaccgtcgccccgccgcgcggcccgggttcgggtggcacggtgggccggaggagaacgaagacgaggccgacgacgccgccgccgatgccgatgccgacgaggcggccccggcgtccggggaggccgtcgacgagcctgccgcggacggcgtcgtctcgccgcggcagctggccctgctggcctcgatggtggacgaggccgttcgcacgatcccgtcgccccccccggagcgcgacggcgcgcaagaagaagcggcccgctcgccttctccgccgcggaccccctccatgcgcgccgattatggcgaggagaacgacgacgacgacgacgacgacgatgacgacgaccgcgacgcgggccgctgggtccgcggaccggagacgacgtccgcggtccgcggggcgtacccggaccccatggccagcctgtcgccgcgacccccggcgccccgccgacaccaccaccaccaccaccaccgccgccggcgcgccccccgccggcgctcggccgcctctgactcatcaaaatccggatcctcgtcgtcggcgtcctccgcctcctcctccgcctcctcctcctcgtctgcatccgcctcctcgtctgacgacgacgacgacgacgacgccgcccgcgcccccgccagcgccgcagaccacgccgcgggcgggaccctcggcgcggacgacgaggaggcgggggtgcccgcgagggccccgggggcggcgccccggccgagcccgcccagggccgagcccgccccggcccggacccccgcggcgaccgcgggccgcctggagcgccgccgggcccgcgcggcggtggccggccgcgacgccacgggccgcttcacggccgggcggccccggcgggtcgagctggacgccgacgcggcctccggcgccttctacgcgcgctaccgcgacgggtacgtcagcggggagccgtggcccggggccggccccccgcccccggggcgcgtgctgtacggcgggctgggcgacagccgccccggcctctggggggcgcccgaggcggaggaggcgcgggcccggttcgaggcctcgggcgccccggcgcccgtgtgggcgcccgagctgggcgacgcggcgcagcagtacgccctgatcacgcggctgctgtacacgccggacgcggaggcgatggggtggctccagaacccgcgcgtggcgcccggggacgtggcgctggaccaggcctgcttccggatctcgggcgcggcgcgcaacagcagctccttcatctccggcagcgtggcgcgggccgtgccccacctggggtacgccatggcggcgggccgcttcggctggggcctggcgcacgtggcggccgccgtggccatgagccgccgctacgaccgcgcgcagaagggcttcctgctgaccagcctgcgccgcgcctacgcgcccctgctggcgcgcgagaacgcggcgctgaccggggcgcgaacccccgacgacggcggcgacgccaaccgccacgacggcgacgacgcccgcgggaagcccgccgccgccgccgccccgttgccgtcggcggcggcgtcgccggccgacgagcgcgcggtgcccgccggctacggcgccgcgggggtgctcgccgccctggggcgcctgagcgccgcgcccgcctccgcgccggccggggccgacgacgacgacgacgacgacggcgccggcggtggtggcggcggccggcgcgcggaggcgggccgcgtggccgtggagtgcctggccgcctgccgcgggatcctggaggcgctggcggagggcttcgacggcgacctggcggccgtgccggggctggccggagcccggcccgccgcgcccccgcgcccggggcccgcgggcgcggccgccccgccgcacgccgacgcgccccgcctgcgcgcctggctgcgcgagctgcggttcgtgcgcgacgcgctggtgctgatgcgcctgcgcggggacctgcgcgtggccggcggcagcgaggccgccgtggccgccgtgcgcgccgtgagcctggtcgccggggccctgggcccggcgctgccgcggagcccgcgcctgctgagctccgccgccgccgccgccgcggacctgctcttccagaaccagagcctgcgccccctgctggccgacaccgtcgccgcggccgactcgctcgccgcgcccgcctccgcgccgcgggaggccgcggacgccccccgccccgcggccgcccctcccgcgggggccgcgccccccgccccgccgacgccgccgccgcggccgccgcgccccgcggcgctgacccgccggcccgccgagggccccgacccgcagggcggctggcgccgccagccgccggggcccagccacacgccggcgccctcggccgccgccctggaggcctactgcgccccgcgggccgtggccgagctcacggaccacccgctcttccccgcgccgtggcgcccggccctcatgttcgacccgcgcgcgctggcctcgctggccgcgcgctgcgccgccccgccccccggcggcgcgcccgccgccttcggcccgctgcgcgcctcgggcccgctgcgccgcgcggcggcctggatgcgccaggtgcccgacccggaggacgtgcgcgtggtgatcctctactcgccgctgccgggcgaggacctggccgcgggccgcgccgggggcgggccccccccggagtggtccgccgagcgcggcgggctgtcctgcctgctggcggccctgggcaaccggctctgcgggcccgccacggccgcctgggcgggcaactggaccggcgcccccgacgtctcggcgctgggcgcgcagggcgtgctgctgctgtccacgcgggacctggccttcgccggcgccgtggagttcctggggctgctggccggcgcctgcgaccgccgcctcatcgtcgtcaacgccgtgcgcgccgcggcctggcccgccgctgcccccgtggtctcgcggcagcacgcctacctggcctgcgaggtgctgcccgccgtgcagtgcgccgtgcgctggccggcggcgcgggacctgcgccgcaccgtgctggcctccggccgcgtgttcgggccgggggtcttcgcgcgcgtggaggccgcgcacgcgcgcctgtaccccgacgcgccgccgctgcgcctctgccgcggggccaacgtgcggtaccgcgtgcgcacgcgcttcggccccgacacgctggtgcccatgtccccgcgcgagtaccgccgcgccgtgctcccggcgctggacggccgggccgccgcctcgggcgcgggcgacgccatggcgcccggcgcgccggacttctgcgaggacgaggcgcactcgcaccgcgcctgcgcgcgctggggcctgggcgcgccgctgcggcccgtctacgtggcgctggggcgcgacgccgtgcgcggcggcccggcggagctgcgcgggccgcggcgggagttctgcgcgcgggcgctgctcgagcccgacggcgacgcgcccccgctggtgctgcgcgacgacgcggacgcgggcccgcccccgcagatacgctgggcgtcggccgcgggccgcgcggggacggtgctggccgcggcgggcggcggcgtggaggtggtggggaccgccgcggggctggccacgccgccgaggcgcgagcccgtggacatggacgcggagctggaggacgacgacgacggactgtttggggagtga

SEQ ID NO: 257 - RNA, 2917 nt, synthetic construct
  misc_feature 1..2917: note = Synthetic Polynucleotide
  source 1..2917: mol_type = other RNA
tcaagcttttggaccctcgtacagaagctaatacgactcactatagggaaataagagagaaaagaagagtaagaagaaatataagagccaccatgagaggtggtggcttagtttgcgcgctggttgtcggggcgctcgtagccgccgtggcgtcggccgcccctgcggctcctcgcgctagcggaggcgtagccgcaacagttgcggcgaacgggggtccagcctctcagcctcctcccgtcccgagccctgcgaccaccaaggctagaaagcggaagaccaagaaaccgcccaagcgccccgaggccaccccgccccccgatgccaacgcgactgtcgccgctggccatgcgacgcttcgcgctcatctgagggagatcaaggttgaaaatgctgatgcccaattttacgtgtgcccgcccccgacgggcgccacggttgtgcagtttgaacagccgcggcgctgtccgacgcggccagaaggccagaactatacggagggcatagcggtggtctttaaggaaaacatcgccccgtacaaatttaaggccacaatgtactacaaagacgtgacagtttcgcaagtgtggtttggccacagatactcgcagtttatgggaatcttcgaagatagagcccctgttcccttcgaggaagtcatcgacaagattaatgccaaaggggtatgccgttccacggccaaatacgtgcgcaacaatatggagaccaccgcctttcaccgggatgatcacgagaccgacatggagcttaagccggcgaaggtcgccacgcgtacctcccggggttggcacaccacagatcttaagtacaatccctcgcgagttgaagcattccatcggtatggaactaccgttaactgcatcgttgaggaggtggatgcgcggtcggtgtacccttacgatgagtttgtgttagcgaccggcgattttgtgtacatgtccccgttttacggctaccgggaggggtcgcacaccgaacatacctcgtacgccgctgacaggttcaagcaggtcgatggcttttacgcgcgcgatctcaccacgaaggcccgggccacgtcaccgacgaccaggaacttgctcacgacccccaagttcaccgtcgcttgggattgggtcccaaagcgtccggcggtctgcacgatgaccaaatggcaggaggtggacgaaatgctccgcgcagaatacggcggctccttccgcttctcgtccgacgccatctcgacaaccttcaccaccaatctgacccagtacagtctgtcgcgcgttgatttaggagactgcattggccgggatgcccgggaggccatcgacagaatgtttgcgcgtaagtacaatgccacacatattaaggtgggccagccgcaatactaccttgccacgggcggctttctcatcgcgtaccagccccttctctcaaatacgctcgctgaactgtacgtgcgggagtatatgagggaacaggaccgcaagccccgcaatgccacgcctgcgccactacgagaggcgccttcagctaatgcgtcggtggaacgtatcaagaccacctcctcaatagagttcgcccggctgcaatttacgtacaaccacatccagcgccacgtgaacgacatgctgggccgcatcgctgtcgcctggtgcgagctgcagaatcacgagctgactctttggaacgaggcccgaaaactcaaccccaacgcgatcgcctccgcaacagtcggtagacgggtgagcgctcgcatgctaggagatgtcatggctgtgtccacctgcgtgcccgtcgctccggacaacgtgattgtgcagaattcgatgcgggtctcatcgcggccgggcacctgctacagcaggcccctcgtcagcttccggtacgaagaccagggcccgctgattgaagggcaactgggagagaacaatgagctgcgcctcacccgcgacgcgctcgaaccctgcaccgtcggacatcggagatatttcatcttcggagggggctacgtgtacttcgaagagtatgcctactctcaccagctgagtagagccgacgtcactaccgtcagcacctttattgacctgaatatcaccatgctggaggaccacgagtttgtgcccctggaagtttacactcgccacgaaatcaaagactccggcctgttggattacacggaggttcagaggcggaaccagctgcatgacctgcgctttgccgacatcgacaccgtcatccgcgccgatgccaacgctgccatgttcgcggggctgtgcgcgttcttcgaggggatgggtgacttggggcgcgccgtcggcaaggtcgtcatgggagtagtggggggcgttgtgagtgccgtcagcggcgtgtcctccttcatgtccaatccattcggagcgcttgctgtggggctgctggtcctggccgggctggtagccgccttcttcgcctttcgatatgttctgcaactgcaacgcaatcccatgaaagctctatatccgctcaccaccaaggagctaaagacgtcagatccaggaggcgtgggcggggaaggggaagagggcgcggagggcggagggtttgacgaagccaaattggccgaggctcgtgaaatgatccgatatatggcactagtgtcggcgatggaaaggaccgaacataaggcccgaaagaagggcacgtcggcgctgctctcatccaaggtcaccaacatggtactgcgcaagcgcaacaaagccaggtactctccgctccataacgaggacgaggcgggagatgaggatgagctctaatgataataggctggagcctcggtggccatgcttcttgccccttgggcctccccccagcccctcctccccttcctgcacccgtacccccgtggtctttgaataaagtctgagtgggcggc

SEQ ID NO: 258 - RNA, 1654 nt, synthetic construct; identical to SEQ ID NO: 235
  misc_feature 1..1654: note = Synthetic Polynucleotide
  source 1..1654: mol_type = other RNA

SEQ ID NO: 259 - RNA, 1393 nt, synthetic construct; identical to SEQ ID NO: 236
  misc_feature 1..1393: note = Synthetic Polynucleotide
  source 1..1393: mol_type = other RNA

SEQ ID NO: 260 - RNA, 1858 nt, synthetic construct; identical to SEQ ID NO: 237
  misc_feature 1..1858: note = Synthetic Polynucleotide
  source 1..1858: mol_type = other RNA

SEQ ID NO: 261 - RNA, 1330 nt, synthetic construct; identical to SEQ ID NO: 238
  misc_feature 1..1330: note = Synthetic Polynucleotide
  source 1..1330: mol_type = other RNA

SEQ ID NO: 262 - RNA, 2515 nt, synthetic construct; identical to SEQ ID NO: 239
  misc_feature 1..2515: note = Synthetic Polynucleotide
  source 1..2515: mol_type = other RNA

SEQ ID NO: 263 - RNA, 1552 nt, synthetic construct
  misc_feature 1..1552: note = Synthetic Polynucleotide
  source 1..1552: mol_type = other RNA
tcaagcttttggaccctcgtacagaagctaatacgactcactatagggaaataagagagaaaagaagagtaagaagaaatataagagccaccatggcactgggaagagtgggattggccgtcggactgtggggactgctgtgggtgggagtcgtcgtcgtcctggctaacgcctcacccggtcggactatcactgtgggacccagggggaacgcctctaacgccgcgccctcagctagccccaggaatgccagcgctcccaggaccaccccgactcctccgcaaccccgcaaggcgaccaagtccaaggcgtccactgccaagccagcgcctccgcctaagactggcccccctaagacctccagcgaacctgtgcggtgcaaccggcacgaccctctggcacgctacggatcgcgggtccaaatccggtgtcggttcccgaacagcactcggaccgaatcgcggctccagatttggagatacgcaactgccactgatgccgagatcggcactgccccaagccttgaggaggtcatggtcaacgtgtcagctcctcctggaggccagctggtgtacgactccgctccgaaccgaaccgacccgcacgtcatctgggccgaaggagccggtcctggtgcatcgccgaggttgtactcggtagtgggtcccctggggagacagcggctgatcatcgaagaactgactctggagactcagggcatgtactattgggtgtggggcagaaccgatagaccatccgcatacggaacctgggtgcgcgtgagagtgttcagacccccgtccttgacaatccacccgcatgcggtgctcgaagggcagcccttcaaggccacttgcactgcggccacttactaccctggaaaccgggccgaattcgtgtggttcgaggatggacggagggtgttcgacccggcgcagattcatacgcagactcaggaaaacccggacggcttctccaccgtgtccactgtgacttcggccgctgtgggaggacaaggaccgccacgcaccttcacctgtcagctgacctggcaccgcgacagcgtgtcctttagccggcggaacgcatcaggcactgcctccgtgttgcctcgcccaaccattaccatggagttcaccggagatcacgccgtgtgcactgctggctgcgtccccgaaggcgtgaccttcgcctggtttctcggggacgactcatccccggcggaaaaggtggccgtggcctctcagaccagctgcggtagaccgggaaccgccaccatccgctccactctgccggtgtcgtacgagcagaccgagtacatttgtcgcctggccggatacccggacggtatcccagtgctcgaacaccacggcagccatcagcctccgccgagagatcctaccgagcgccaggtcatccgggccgtggaaggatgataataggctggagcctcggtggccatgcttcttgccccttgggcctccccccagcccctcctccccttcctgcacccgtacccccgtggtctttgaataaagtctgagtgggcggc

SEQ ID NO: 264 - RNA, 1462 nt, synthetic construct; identical to SEQ ID NO: 241
  misc_feature 1..1462: note = Synthetic Polynucleotide
  source 1..1462: mol_type = other RNA

SEQ ID NO: 265 - RNA, 997 nt, Human herpesvirus 2; identical to SEQ ID NO: 243
  source 1..997: mol_type = mRNA

SEQ ID NO: 266 - RNA, 1228 nt, synthetic construct; identical to SEQ ID NO: 244
  misc_feature 1..1228: note = Synthetic Polynucleotide
  source 1..1228: mol_type = other RNA

SEQ ID NO: 267 - RNA, 2473 nt, synthetic construct
  misc_feature 1..2473: note = Synthetic Polynucleotide
  source 1..2473: mol_type = other RNA
tcaagcttttggaccctcgtacagaagctaatacgactcactatagggaaataagagagaaaagaagagtaagaagaaatataagagccaccatggaaccgcggcctggtacttcatcccgcgccgatcctggaccggaacggccacctcgccagacccctggaacgcagcctgcagcccctcacgcctgggggatgctgaatgatatgcagtggctggcctcaagcgactccgaggaagagacagaggtcggcatctccgacgatgatctccatcgggattctacttcggaagcgggctccaccgacacagagatgttcgaggccggcctgatggatgctgcgacccctcccgcaagaccgcctgccgaacgccaaggctcgccgacccctgctgacgcccagggttcgtgcggtggaggccctgtgggggaggaggaagctgaagccggaggcggtggagatgtcaacaccccggtggcctacctgatcgtgggcgtgactgccagcggatccttctcgaccatccccattgtcaacgatccccgcactcgggtcgaagcggaggccgcagtgcgggctggaactgccgtggacttcatttggactggcaatcccaggaccgctccccggtcactgtccctgggaggacacaccgtccgcgccctgtcaccaactcccccgtggcctggaaccgatgacgaggacgacgacctggccgatgtggactacgtgccccctgccccaagacgggctccacggagaggaggcggaggcgccggtgccaccaggggcaccagccaacccgctgccacccggcctgctcctcctggggccccgagatcctcctcatccggcggggcacctctgagagcaggagtgggctcaggctccggaggaggacccgccgtggcagctgtggtcccgcgagtggcctccttgcctccggccgcaggaggcggccgggcccaggccagaagggtgggggaggacgcggcagccgccgaagggcgcactcctccagcgcgccaaccaagagcagcgcaagagcctccgatcgtgatctccgatagccccccaccgtcacctcgcagaccagccggacccgggcctctgtcgttcgtgagctccagctcggcccaggtgtcgagcggacctggcggtggtggactccctcagagcagcggcagagctgccagacctcgcgccgccgtggccccgagggtcaggtcgccgccgagagcagctgccgccccagtggtgtccgcctcagccgacgccgccggtcccgcgcctcctgctgtgccagtggacgcccatagagcgccgcggagcagaatgactcaggcacagactgacacccaggcccagtcgctcggtagggctggagccaccgacgccagaggatcgggcggacccggagccgaaggagggtccggtcccgccgcttcctcctccgcgtcctcatcagccgctccgcgctcaccgctcgcaccccagggtgtcggagcaaagcgagcagctcctcgccgggcccctgactccgactcaggagatcggggccacggaccactcgcgcctgccagcgctggagcggctcctccatcggcttccccatcctcgcaagcagccgtggccgccgcatcctcaagctcggcgtcctctagctcagcgagctcctccagcgcctcgtcctcgtccgcctccagcagctcagcctcctcgtcctcggcctcctcatcgtccgcctcctcctccgctggaggtgccggaggatcggtcgcatccgcttccggcgcaggggagcgccgagaaacgtccctgggtccgcgggcagctgctccgaggggtcctcgcaagtgcgcgcggaaaactcggcacgcggagggaggaccggaacctggcgcgagagatcctgcgcctggactgacccggtacctccccattgccggggtgtccagcgtggtggcacttgccccgtacgtcaacaagaccgtgaccggggactgtctccccgtgctcgacatggagactggacacattggcgcgtatgtggtcctggtggatcagaccggtaatgtggccgaccttttgagagcagcggccccagcatggtcccgcagaaccctgctgcctgagcacgccaggaattgcgtgcggccgccggactacccgactccgcccgccagcgaatggaactcactgtggatgactcccgtgggcaacatgctgttcgatcaggggaccctggtcggagccctggattttcacggcctgcgctccagacatccgtggtctagggaacagggtgctcctgctcccgcgggtgatgcccctgctggccacggcgaatagtgataataggctggagcctcggtggccatgcttcttgccccttgggcctccccccagcccctcctccccttcctgcacccgtacccccgtggtctttgaataaagtctgagtgggcggc

SEQ ID NO: 268 - RNA, 4096 nt, Human herpesvirus 2
  source 1..4096: mol_type = mRNA
tcaagcttttggaccctcgtacagaagctaatacgactcactatagggaaataagagagaaaagaagagtaagaagaaatataagagccaccatgtcggccgagcagcgcaagaagaagaaaacgaccaccactacccagggcagaggagccgaagtcgccatggccgatgaagatggcgggaggctgcgggccgccgctgaaaccaccggaggaccgggatcccctgaccctgcggacggcccacctcccacaccgaacccggacagacggcctgctgcaaggcccggtttcggatggcacgggggacccgaagagaacgaggacgaagccgatgacgccgcggcggatgcagacgccgacgaggcggctcccgcttcgggagaagcggtggacgaaccggccgccgatggagtggtcagcccccgccagctcgcgctgctcgcgtccatggtggatgaagccgtgagaactatcccctcacctccgccggaacgggatggagctcaagaggaagccgccagaagcccgtcccctccgagaactccatccatgcgggccgactacggcgaagagaatgacgacgatgatgacgacgatgatgacgatgaccgcgatgccggacggtgggtccgcggacctgagactacctccgccgtgcgcggagcctaccctgatccgatggcctcacttagcccccggccacccgccccccgccgccaccaccaccatcatcaccaccgcagaagaagggctcccaggcgcagatcagcagcttccgacagctcgaagtccggctcctcgtcctccgccagcagcgcatcctcgtcagcgtcctcatcgtccagcgcctcggcgagctcctccgacgatgacgacgacgacgatgccgccagagctccggcatcagccgcggaccatgccgccggaggaaccctcggtgccgacgacgaggaggccggcgtgcctgcccgcgctccgggagctgctcctaggccttcaccaccccgggcggagccagcccctgccagaacgccagcagccaccgctgggcgattggagaggcggagagcccgggccgccgtggccggtcgggatgccaccggccgcttcactgccggacgccctcggcgcgtcgaactggacgcagacgccgcctcgggcgcgttctacgcccgctatcgggacggttatgtgtccggcgagccttggcctggtgccggtcctcctccgcctgggagagtgctctacgggggtctgggtgattctcggccagggttgtggggagcccccgaggcggaggaagccagagcccgcttcgaagcatccggagcaccggcccctgtgtgggcgccggaactgggcgacgccgcccaacaatacgccctgatcacacgcctgctctacactccggacgccgaagccatgggctggctgcagaacccgagagtggccccgggtgatgtggccctggaccaggcatgcttcaggattagcggagccgcgagaaactcgagcagctttatctcaggatctgtggcccgagccgtgccgcacctgggctacgcgatggccgccggacgcttcggatgggggctggcccatgtcgctgccgcggtggcgatgtcccggcggtacgaccgggctcagaagggtttcctcctcaccagcctccggagggcatacgccccgttgctggctcgggagaacgccgctctgactggcgcccgcactcctgatgacggtggcgacgccaaccgccacgacggcgacgatgcacggggaaagcccgcggccgccgccgccccccttcctagcgcagccgcttcgcctgccgacgaacgggctgtccctgccggatacggagccgccggtgtgctggcggcccttgggagactgtcagccgcgcctgcttcagcgccggccggagccgacgatgacgacgacgacgatggagccggaggagggggcggcggtcggagagcagaagccggcagggtggcagtcgaatgccttgctgcctgtcgcgggatcctcgaggcgttggccgaaggcttcgacggcgacctggcggcagtgcctggcctggccggcgcccgccccgctgcccctccacggcccggtccggccggggccgcagcccctccgcatgctgacgcgcctcgcctcagagcatggctgagagaattgagatttgtgcgggatgcgctggtccttatgcgcctgaggggggatctgagggtggccggaggttccgaggcggccgtggctgctgtgcgggccgtgtccctggtggccggtgcgctgggtcccgctctgccgcggtcccctagattgctttcctcagcggccgccgccgcagccgatctgctctttcagaaccaaagcctcaggccgctgctggccgacactgtcgccgctgcggactccctcgctgccccagcctcggccccaagagaggctgccgatgcccctcgccccgccgcggccccgcctgccggagcagcgccgcctgcaccccctactccccccccgcgaccgccacgcccagccgctcttaccagaaggccagctgagggtcctgacccgcagggcggctggcgcagacagcccccgggaccttcccacactcccgccccatctgcggctgcccttgaagcatactgtgccccgagagctgtggcggagctgaccgaccaccctctgttccctgcaccttggcggcctgccctgatgtttgacccgagagcgttggcctccctggcggccagatgtgcggccccgcctcccggaggagccccagctgcattcggacctctgcgggcatccggaccactgcggcgcgctgctgcatggatgcggcaagtgccggaccctgaggacgttcgcgtggtcattctttactcccccctgccgggagaagatctcgccgccggccgcgcgggaggaggccctccacccgagtggtccgctgaacggggaggcctgtcctgcctgctggctgccctgggaaaccgcctgtgcggaccagctactgccgcctgggctggaaactggaccggcgcacccgatgtgtcagccctcggagcgcagggagtgctgctgctgtcaactcgcgacctggcattcgccggagctgtggagttcctgggtctgcttgccggcgcgtgcgaccggagattgatcgtcgtgaacgctgtcagagcggccgcttggcctgccgctgctccggtggtcagccggcagcacgcatatctggcctgcgaggtgctgcccgccgtgcagtgtgccgtgcggtggccagcggccagagacttgcgacggaccgtgctggcctccggtagggtctttggccccggagtgttcgcccgcgtggaggccgcccatgccagactgtaccccgacgcaccgcccctgagactgtgccggggagccaacgtgcggtacagagtccgcacccgcttcggacccgatactctggtgccaatgtcaccgcgggaatataggagagccgtgctcccggcactggacggcagagccgccgcatccggtgctggggacgcgatggcacccggagcccccgacttttgcgaggatgaagcccacagccatcgggcctgtgccagatggggcctgggtgcccctcttcgccccgtgtacgtggccctggggagagatgccgtccgcggtggaccagccgagctgagaggcccacgccgggaattttgcgctcgggccctgctcgagcccgatggagatgcgcctccccttgtgctgcgcgacgacgctgacgccggcccacctccgcaaatccggtgggccagcgccgccggtcgagcaggaacggtgttggcagcagccggaggaggagtcgaagtggtcggaaccgcggctggactggcaaccccgccaaggcgcgaacctgtggatatggacgccgagctggaggatgacgacgatggccttttcggcgagtgatgataataggctggagcctcggtggccatgcttcttgccccttgggcctccccccagcccctcctccccttcctgcacccgtacccccgtggtctttgaataaagtctgagtgggcggc

SEQ ID NO: 269 - DNA, 1462 bp, synthetic construct
  misc_feature 1..1462: note = Synthetic Polynucleotide
  source 1..1462: mol_type = other DNA
tcaagcttttggaccctcgtacagaagctaatacgactcactatagggaaataagagagaaaagaagagtaagaagaaatataagagccaccatggctcgcggggccgggttggtgttctttgttggagtttgggtcgtatcgtgcctggcggcagcacccagaacgtcctggaaacgggttacctcgggcgaggacgtggtgttgcttccggcgcccgcggggccggaggaacgcacacgggcccacaaactactgtgggccgcggaacccctggatgcctgcggtcccctgaggccgtcgtgggtggcgctgtggcccccgcgacgggtgctcgaaacggtcgtggatgcggcgtgcatgcgcgccccggaaccgctcgccatagcatacagtcccccgttccccgcgggcgacgagggactgtattcggagttggcgtggcgcgatcgcgtagccgtggtcaacgagagtctggtcatctacggggccctggagacggacagcggtctgtacaccctgtccgtggtcggcctaagcgacgaggcgcgccaagtggcgtcggtggttctggtcgtggagcccgcccctgtgccgaccccgacccccgacgactacgacgaagaagacgacgcgggcgtgagcgaacgcacgccggtcagcgtaccccccccgaccccaccccgtcgtccccccgtcgccccccctacgcaccctcgtgttatccccgaggtgtcccacgtgcgcggggtaacggtccatatggagaccccggaggccattctgtttgcccccggagagacgtttgggacgaacgtctccatccacgccattgcccatgacgacggtccgtacgccatggacgtcgtctggatgcggtttgacgtgccgtcctcgtgcgccgagatgcggatctacgaagcttgtctgtatcacccgcagcttccagaatgtctatctccggccgacgcgccgtgcgctgtaagttcctgggcgtaccgcctggcggtccgcagctacgccggctgttccaggactacgcccccgccgcgatgttttgccgaggctcgcatggaaccggtcccggggttggcgtggttagcctccaccgtcaacctggaattccagcacgcctcccctcagcacgccggcctttacctgtgcgtggtgtacgtggacgatcatatccacgcctggggccacatgaccatctctaccgcggcgcagtaccggaacgcggtggtggaacagcacttgccccagcgccagcctgaacccgtcgagcccacccgcccgcacgtaagagcaccccctcccgcgccttccgcgcgcggcccgctgcgctgataataggctggagcctcggtggccatgcttcttgccccttgggcctccccccagcccctcctccccttcctgcacccgtacccccgtggtctttgaataaagtctgagtgggcggc

SEQ ID NO: 270 - DNA, 2647 bp, synthetic construct
  misc_feature 1..2647: note = Synthetic Polynucleotide
  source 1..2647: mol_type = other DNA
tcaagcttttggaccctcgtacagaagctaatacgactcactatagggaaataagagagaaaagaagagtaagaagaaatataagagccaccatgagaggcggcggccttgtgtgcgccctagtggtgggagcccttgtggccgccgtagcaagcgccgcccctgcggccccaagagccagcggcggcgtggcagcaacagttgccgctaacggcggcccagccagccagcctcctccagtgcctagcccagctaccaccaaggccagaaagagaaagaccaagaagcctcctaagcgtcctgaggccaccccaccaccagacgccaatgcgaccgtggccgcaggccacgccaccctgagagcccacctgagagagatcaaggtggagaacgccgacgcccagttctacgtgtgtcctccgcctaccggtgcaacagtggtgcagttcgagcagcctagaagatgccctacccgaccagagggtcagaactacaccgagggcatcgccgtggtgttcaaggagaacatcgccccttacaagttcaaggccaccatgtactacaaggacgtgaccgtgagccaggtgtggttcggccacagatacagccagttcatgggcatcttcgaggacagagccccagtacctttcgaggaggtgatcgacaagatcaacgccaagggcgtgtgcagaagcaccgccaagtacgtgagaaacaacatggagacaaccgccttccacagagacgaccacgaaaccgacatggagctgaagcctgccaaggtggccaccagaaccagcagaggctggcacaccaccgacctgaagtacaaccctagcagagtggaggcgttccaccgatacggcaccaccgtgaactgcatcgtggaagaggtcgacgccagaagcgtgtacccttacgacgagttcgtgctggccaccggcgacttcgtgtacatgagccctttctacggctacagagagggcagccacaccgagcacaccagctacgccgccgacagattcaagcaagttgacggcttctacgcccgggatcttacaactaaggctagagcaactagccctactactaggaacctgcttactacccctaagttcacagtggcctgggactgggtgcctaagaggcctgccgtgtgcaccatgaccaagtggcaggaagtcgacgagatgcttcgcgcagagtacggcggcagcttcagattcagcagcgacgccatcagcaccaccttcaccacaaacctgacccagtacagcctgtctcgagtcgacctgggcgattgtatcggcagagatgcaagagaggccatcgacagaatgttcgccaggaagtataacgctacccacattaaggtgggtcagccacagtactacctagcaactggcggcttcctgatcgcctaccagcctctgctgagcaacaccctggccgagctctacgtacgggaatatatgagagagcaggacagaaagccaaggaacgcaactcctgcccctctgagggaagctcctagcgccaacgccagcgtggagagaatcaagaccaccagcagcatcgaattcgcccggctgcagttcacctacaaccacatccagagacacgtgaacgacatgctgggcagaatcgctgtggcttggtgcgagctgcagaaccacgagctgaccctgtggaacgaggcgcgcaagctgaaccctaacgccatcgcctccgccaccgtgggtaggagagtgagcgccagaatgctgggagatgtgatggccgtgagcacctgcgtgcctgtggcccctgacaacgtgatcgtgcagaacagcatgcgggttagcagcagacctggcacctgctactcacgacctctggtgtcattcagatacgaggaccagggccctctgatcgaaggacagttgggcgagaacaacgagcttagactgacccgtgatgcgctggagccttgtaccgtgggacatcgaagatacttcatcttcggaggtggatacgtgtatttcgaagaatacgcctacagtcatcagctttctcgagccgatgtgactaccgtgagtaccttcatcgatcttaacatcaccatgctggaggatcatgaattcgtgcctctggaggtgtacaccagacacgagattaaggattctggacttctggactataccgaagtgcagagaagaaaccagctgcacgacctgagattcgccgacatcgacaccgtgatcagggcagatgctaacgcagccatgttcgcaggcctgtgcgccttcttcgaaggcatgggcgatctaggacgggccgttggaaaggtggtgatgggcgtggtcggcggagttgtaagtgctgtgtctggcgtttcctcattcatgagcaaccctttcttcttcatcatcggcctgatcataggattgttcctggtcctccgagtgggcatccacctgtgcatcaagttgaagcatactaagaagagacagatttatacggacattgagatgaacagactgggcaagtgataataggctggagcctcggtggccatgcttcttgccccttgggcctccccccagcccctcctccccttcctgcacccgtacccccgtggtctttgaataaagtctgagtgggcggc

SEQ ID NO: 271 - DNA, 1462 bp, synthetic construct; identical to SEQ ID NO: 269
  misc_feature 1..1462: note = Synthetic Polynucleotide
  source 1..1462: mol_type = other DNA

SEQ ID NO: 272 - DNA, 1855 bp, synthetic construct
  misc_feature 1..1855: note = Synthetic Polynucleotide
  source 1..1855: mol_type = other DNA
tcaagcttttggaccctcgtacagaagctaatacgactcactatagggaaataagagagaaaagaagagtaagaagaaatataagagccaccatggctaggggggccgggttggtcttctttgttggagtttgggtcgtaagctgcctcgcggcagcgcccagaacgtcctggaaacgcgtaacctcgggcgaagacgtggtgttactccccgcgccggcggggccggaagaacgcactcgggcccacaaactactgtgggcagcggaaccgctggatgcctgcggtcccctgaggccgtcatgggtggcactgtggccgccccgacgagtgcttgagacggttgtcgatgcggcgtgcatgcgcgccccggaaccgctcgctatcgcatacagtcccccgttccctgcgggcgacgagggactttattcggagttggcgtggcgcgatcgcgtagccgtggtcaacgagagtttagttatctacggggccctggagacggacagtggtctgtacaccctgtcagtggtgggcctatccgacgaggcccgccaagtggcgtccgtggttctcgtcgtcgagcccgcccctgtgcctaccccgacccccgatgactacgacgaggaggatgacgcgggcgtgagcgaacgcacgcccgtcagcgttccacctccaacaccaccccgacgtccccccgtcgccccaccgacgcaccctcgtgttatccctgaggtgagccacgtgcggggggtgacggtccacatggaaaccccggaggccattctgtttgcgccaggggagacgtttgggacgaacgtctccatccacgcaattgcccacgacgacggtccgtacgccatggacgtcgtctggatgcgatttgatgtcccgtcctcgtgcgccgagatgcggatctatgaagcatgtctgtatcacccgcagctgcctgagtgtctgtctccggccgatgcgccgtgcgccgtaagttcgtgggcgtaccgcctggcggtccgcagctacgccggctgctccaggactacgcccccacctcgatgttttgctgaagctcgcatggaaccggtccccgggttggcgtggctcgcatcaactgttaatctggaattccagcatgcctctccccaacacgccggcctctatctgtgtgtggtgtatgtggacgaccatatccatgcctggggccacatgaccatctccacagcggcccagtaccggaatgcggtggtggaacagcatctcccccagcgccagcccgagcccgtagaacccacccgaccgcatgtgagagccccgcctcccgcaccctccgcgagaggcccgttacgcttaggtgcggtcctgggggcggccctgttgctcgcggccctcgggctatccgcctgggcgtgcatgacctgctggcgcaggcgcagttggcgggcggttaagagtcgggcctcggcgaccggccccacttacattcgagtagcggatagcgagctgtacgcggactggagttcggactcagagggcgagcgcgacggttccctgtggcaggaccctccggagagacccgactcaccgtccacaaatggatccggctttgagatcttatccccaacggcgccctctgtatacccccatagcgaagggcgtaaatcgcgccgcccgctcaccacctttggttcaggaagcccgggacgtcgtcactcccaggcgtcctattcttccgtcttatggtgataataggctggagcctcggtggccatgcttcttgccccttgggcctccccccagcccctcctccccttcctgcacccgtacccccgtggtctttgaataaagtctgagtgggcggc

SEQ ID NO: 273 - RNA, 1462 nt, synthetic construct
  misc_feature 1..1462: note = Synthetic Polynucleotide
  source 1..1462: mol_type = other RNA
tcaagcttttggaccctcgtacagaagctaatacgactcactatagggaaataagagagaaaagaagagtaagaagaaatataagagccaccatggctcgcggggccgggttggtgttctttgttggagtttgggtcgtatcgtgcctggcggcagcacccagaacgtcctggaaacgggttacctcgggcgaggacgtggtgttgcttccggcgcccgcggggccggaggaacgcacacgggcccacaaactactgtgggccgcggaacccctggatgcctgcggtcccctgaggccgtcgtgggtggcgctgtggcccccgcgacgggtgctcgaaacggtcgtggatgcggcgtgcatgcgcgccccggaaccgctcgccatagcatacagtcccccgttccccgcgggcgacgagggactgtattcggagttggcgtggcgcgatcgcgtagccgtggtcaacgagagtctggtcatctacggggccctggagacggacagcggtctgtacaccctgtccgtggtcggcctaagcgacgaggcgcgccaagtggcgtcggtggttctggtcgtggagcccgcccctgtgccgaccccgacccccgacgactacgacgaagaagacgacgcgggcgtgagcgaacgcacgccggtcagcgtaccccccccgaccccaccccgtcgtccccccgtcgccccccctacgcaccctcgtgttatccccgaggtgtcccacgtgcgcggggtaacggtccatatggagaccccggaggccattctgtttgcccccggagagacgtttgggacgaacgtctccatccacgccattgcccatgacgacggtccgtacgccatggacgtcgtctggatgcggtttgacgtgccgtcctcgtgcgccgagatgcggatctacgaagcttgtctgtatcacccgcagcttccagaatgtctatctccggccgacgcgccgtgcgctgtaagttcctgggcgtaccgcctggcggtccgcagctacgccggctgttccaggactacgcccccgccgcgatgttttgccgaggctcgcatggaaccggtcccggggttggcgtggttagcctccaccgtcaacctggaattccagcacgcctcccctcagcacgccggcctttacctgtgcgtggtgtacgtggacgatcatatccacgcctggggccacatgaccatctctaccgcggcgcagtaccggaacgcggtggtggaacagcacttgccccagcgccagcctgaacccgtcgagcccacccgcccgcacgtaagagcaccccctcccgcgccttccgcgcgcggcccgctgcgctgataataggctggagcctcggtggccatgcttcttgccccttgggcctccccccagcccctcctccccttcctgcacccgtacccccgtggtctttgaataaagtctgagtgggcggc

SEQ ID NO: 274 - RNA, 2647 nt, synthetic construct
  misc_feature 1..2647: note = Synthetic Polynucleotide
  source 1..2647: mol_type = other RNA
tcaagcttttggaccctcgtacagaagctaatacgactcactatagggaaataagagagaaaagaagagtaagaagaaatataagagccaccatgagaggcggcggccttgtgtgcgccctagtggtgggagcccttgtggccgccgtagcaagcgccgcccctgcggccccaagagccagcggcggcgtggcagcaacagttgccgctaacggcggcccagccagccagcctcctccagtgcctagcccagctaccaccaaggccagaaagagaaagaccaagaagcctcctaagcgtcctgaggccaccccaccaccagacgccaatgcgaccgtggccgcaggccacgccaccctgagagcccacctgagagagatcaaggtggagaacgccgacgcccagttctacgtgtgtcctccgcctaccggtgcaacagtggtgcagttcgagcagcctagaagatgccctacccgaccagagggtcagaactacaccgagggcatcgccgtggtgttcaaggagaacatcgccccttacaagttcaaggccaccatgtactacaaggacgtgaccgtgagccaggtgtggttcggccacagatacagccagttcatgggcatcttcgaggacagagccccagtacctttcgaggaggtgatcgacaagatcaacgccaagggcgtgtgcagaagcaccgccaagtacgtgagaaacaacatggagacaaccgccttccacagagacgaccacgaaaccgacatggagctgaagcctgccaaggtggccaccagaaccagcagaggctggcacaccaccgacctgaagtacaaccctagcagagtggaggcgttccaccgatacggcaccaccgtgaactgcatcgtggaagaggtcgacgccagaagcgtgtacccttacgacgagttcgtgctggccaccggcgacttcgtgtacatgagccctttctacggctacagagagggcagccacaccgagcacaccagctacgccgccgacagattcaagcaagttgacggcttctacgcccgggatcttacaactaaggctagagcaactagccctactactaggaacctgcttactacccctaagttcacagtggcctgggactgggtgcctaagaggcctgccgtgtgcaccatgaccaagtggcaggaagtcgacgagatgcttcgcgcagagtacggcggcagcttcagattcagcagcgacgccatcagcaccaccttcaccacaaacctgacccagtacagcctgtctcgagtcgacctgggcgattgtatcggcagagatgcaagagaggccatcgacagaatgttcgccaggaagtataacgctacccacattaaggtgggtcagccacagtactacctagcaactggcggcttcctgatcgcctaccagcctctgctgagcaacaccctggccgagctctacgtacgggaatatatgagagagcaggacagaaagccaaggaacgcaactcctgcccctctgagggaagctcctagcgccaacgccagcgtggagagaatcaagaccaccagcagcatcgaattcgcccggctgcagttcacctacaaccacatccagagacacgtgaacgacatgctgggcagaatcgctgtggcttggtgcgagctgcagaaccacgagctgaccctgtggaacgaggcgcgcaagctgaaccctaacgccatcgcctccgccaccgtgggtaggagagtgagcgccagaatgctgggagatgtgatggccgtgagcacctgcgtgcctgtggcccctgacaacgtgatcgtgcagaacagcatgcgggttagcagcagacctggcacctgctactcacgacctctggtgtcattcagatacgaggaccagggccctctgatcgaaggacagttgggcgagaacaacgagcttagactgacccgtgatgcgctggagccttgtaccgtgggacatcgaagatacttcatcttcggaggtggatacgtgtatttcgaagaatacgcctacagtcatcagctttctcgagccgatgtgactaccgtgagtaccttcatcgatcttaacatcaccatgctggaggatcatgaattcgtgcctctggaggtgtacaccagacacgagattaaggattctggacttctggactataccgaagtgcagagaagaaaccagctgcacgacctgagattcgccgacatcgacaccgtgatcagggcagatgctaacgcagccatgttcgcaggcctgtgcgccttcttcgaaggcatgggcgatctaggacgggccgttggaaaggtggtgatgggcgtggtcggcggagttgtaagtgctgtgtctggcgtttcctcattcatgagcaaccctttcttcttcatcatcggcctgatcataggattgttcctggtcctccgagtgggcatccacctgtgcatcaagttgaagcatactaagaagagacagatttatacggacattgagatgaacagactgggcaagtgataataggctggagcctcggtggccatgcttcttgccccttgggcctccccccagcccctcctccccttcctgcacccgtacccccgtggtctttgaataaagtctgagtgggcggc

SEQ ID NO: 275 - RNA, 1462 nt, synthetic construct; identical to SEQ ID NO: 273
  misc_feature 1..1462: note = Synthetic Polynucleotide
  source 1..1462: mol_type = other RNA

SEQ ID NO: 276 - RNA, 1855 nt, synthetic construct
  misc_feature 1..1855: note = Synthetic Polynucleotide
  source 1..1855: mol_type = other RNA
tcaagcttttggaccctcgtacagaagctaatacgactcactatagggaaataagagagaaaagaagagtaagaagaaatataagagccaccatggctaggggggccgggttggtcttctttgttggagtttgggtcgtaagctgcctcgcggcagcgcccagaacgtcctggaaacgcgtaacctcgggcgaagacgtggtgttactccccgcgccggcggggccggaagaacgcactcgggcccacaaactactgtgggcagcggaaccgctggatgcctgcggtcccctgaggccgtcatgggtggcactgtggccgccccgacgagtgcttgagacggttgtcgatgcggcgtgcatgcgcgccccggaaccgctcgctatcgcatacagtcccccgttccctgcgggcgacgagggactttattcggagttggcgtggcgcgatcgcgtagccgtggtcaacgagagtttagttatctacggggccctggagacggacagtggtctgtacaccctgtcagtggtgggcctatccgacgaggcccgccaagtggcgtccgtggttctcgtcgtcgagcccgcccctgtgcctaccccgacccccgatgactacgacgaggaggatgacgcgggcgtgagcgaacgcacgcccgtcagcgttccacctccaacaccaccccgacgtccccccgtcgccccaccgacgcaccctcgtgttatccctgaggtgagccacgtgcggggggtgacggtccacatggaaaccccggaggccattctgtttgcgccaggggagacgtttgggacgaacgtctccatccacgcaattgcccacgacgacggtccgtacgccatggacgtcgtctggatgcgatttgatgtcccgtcctcgtgcgccgagatgcggatctatgaagcatgtctgtatcacccgcagctgcctgagtgtctgtctccggccgatgcgccgtgcgccgtaagttcgtgggcgtaccgcctggcggtccgcagctacgccggctgctccaggactacgcccccacctcgatgttttgctgaagctcgcatggaaccggtccccgggttggcgtggctcgcatcaactgttaatctggaattccagcatgcctctccccaacacgccggcctctatctgtgtgtggtgtatgtggacgaccatatccatgcctggggccacatgaccatctccacagcggcccagtaccggaatgcggtggtggaacagcatctcccccagcgccagcccgagcccgtagaacccacccgaccgcatgtgagagccccgcctcccgcaccctccgcgagaggcccgttacgcttaggtgcggtcctgggggcggccctgttgctcgcggccctcgggctatccgcctgggcgtgcatgacctgctggcgcaggcgcagttggcgggcggttaagagtcgggcctcggcgaccggccccacttacattcgagtagcggatagcgagctgtacgcggactggagttcggactcagagggcgagcgcgacggttccctgtggcaggaccctccggagagacccgactcaccgtccacaaatggatccggctttgagatcttatccccaacggcgccctctgtatacccccatagcgaagggcgtaaatcgcgccgcccgctcaccacctttggttcaggaagcccgggacgtcgtcactcccaggcgtcctattcttccgtcttatggtgataataggctggagcctcggtggccatgcttcttgccccttgggcctccccccagcccctcctccccttcctgcacccgtacccccgtggtctttgaataaagtctgagtgggcggc

SEQ ID NO: 277 - protein, 812 aa, synthetic construct
  REGION 1..812: note = Synthetic Polypeptide
MRGGGLVCALVVGALVAAVASAAPAAPRASGGVAATVAANGGPASQPPPVPSPATTKARKRKTKKPPKRPEATPPPDANATVAAGHATLRAHLREIKVENADAQFYVCPPPTGATVVQFEQPRRCPTRPEGQNYTEGIAVVFKENIAPYKFKATMYYKDVTVSQVWFGHRYSQFMGIFEDRAPVPFEEVIDKINAKGVCRSTAKYVRNNMETTAFHRDDHETDMELKPAKVATRTSRGWHTTDLKYNPSRVEAFHRYGTTVNCIVEEVDARSVYPYDEFVLATGDFVYMSPFYGYREGSHTEHTSYAADRFKQVDGFYARDLTTKARATSPTTRNLLTTPKFTVAWDWVPKRPAVCTMTKWQEVDEMLRAEYGGSFRFSSDAISTTFTTNLTQYSLSRVDLGDCIGRDAREAIDRMFARKYNATHIKVGQPQYYLATGGFLIAYQPLLSNTLAELYVREYMREQDRKPRNATPAPLREAPSANASVERIKTTSSIEFARLQFTYNHIQRHVNDMLGRIAVAWCELQNHELTLWNEARKLNPNAIASATVGRRVSARMLGDVMAVSTCVPVAPDNVIVQNSMRVSSRPGTCYSRPLVSFRYEDQGPLIEGQLGENNELRLTRDALEPCTVGHRRYFIFGGGYVYFEEYAYSHQLSRADVTTVSTFIDLNITMLEDHEFVPLEVYTRHEIKDSGLLDYTEVQRRNQLHDLRFADIDTVIRADANAAMFAGLCAFFEGMGDLGRAVGKVVMGVVGGVVSAVSGVSSFMSNPFFFIIGLIIGLFLVLRVGIHLCIKLKHTKKRQIYTDIEMNRLGK

SEQ ID NO: 278 - protein, 480 aa, synthetic construct
  REGION 1..480: note = Synthetic Polypeptide
MALGRVGLAVGLWGLLWVGVVVVLANASPGRTITVGPRGNASNAAPSASPRNASAPRTTPTPPQPRKATKSKASTAKPAPPPKTGPPKTSSEPVRCNRHDPLARYGSRVQIRCRFPNSTRTESRLQIWRYATATDAEIGTAPSLEEVMVNVSAPPGGQLVYDSAPNRTDPHVIWAEGAGPGASPRLYSVVGPLGRQRLIIEELTLETQGMYYWVWGRTDRPSAYGTWVRVRVFRPPSLTIHPHAVLEGQPFKATCTAATYYPGNRAEFVWFEDGRRVFDPAQIHTQTQENPDGFSTVSTVTSAAVGGQGPPRTFTCQLTWHRDSVSFSRRNASGTASVLPRPTITMEFTGDHAVCTAGCVPEGVTFAAFLGDDSSPAEKVAVASQTSCGRPGTATIRSTLPVSYEQTEYICRLAGYPDGIPVLEHHGSHQPPPRDPTERQVIRAVEGAGIGVAVLVAVVLAGTAVVYLTHASSVRYRRLR

SEQ ID NO: 279 - protein, 480 aa, synthetic construct
  REGION 1..480: note = Synthetic Polypeptide
MALGRVGLAVGLWGLLWVGVVVVLANASPGRTITVGPRGNASNAAPSASPRNASAPRTTPTPPQPRKATKSKASTAKPAPPPKTGPPKTSSEPVRCNRHDPLARYGSRVQIRCRFPNSTRTESRLQIWRYATATDAEIGTAPSLEEVMVNVSAPPGGQLVYDSAPNRTDPHVIWAEGAGPGASPRLYSVVGPLGRQRLIIEELTLETQGMYYWVWGRTDRPSAYGTWVRVRVFRPPSLTIHPHAVLEGQPFKATCTAATYYPGNRAEFVWFEDGRRVFDPAQIHTQTQENPDGFSTVSTVTSAAVGGQGPPRTFTCQLTWHRASVSFSRRNASGTASVLPRPTITMEFTGDHAVCTAGCVPEGVTFAWFLGDDSSPAEKVAVASQTSCGRPGTATIRSTLPVSYEQTEYICRLAGYPDGIPVLEHHGSHQPPPRDPTERQVIRAVEGAGIGVAVLVAVVLAGTAVVYLTHASSVRYRRLR

SEQ ID NO: 280 - protein, 480 aa, synthetic construct
  REGION 1..480: note = Synthetic Polypeptide
MALGRVGLAVGLWGLLWVGVVVVLANASPGRTITVGPRGNASNAAPSASPRNASAPRTTPTPPQPRKATKSKASTAKPAPPPKTGPPKTSSEPVRCNRHDPLARYGSRVQIRCRFPNSTRTESRLQIWRYATATDAEIGTAPSLEEVMVNVSAPPGGQLVYDSAPNRTDPHVIWAEGAGPGASPRLYSVVGPLGRQRLIIEELTLETQGMYYWVWGRTDRPSAYGTWVRVRVFRPPSLTIHPHAVLEGQPFKATCTAATYYPGNRAEFVWFEDGRRVFDPAQIHTQTQENPDGFSTVSTVTSAAVGGQGPPRTFTCQLTWHRDSVSASRRNASGTASVLPRPTITMEFTGDHAVCTAGCVPEGVTFAWFLGDDSSPAEKVAVASQTSCGRPGTATIRSTLPVSYEQTEYICRLAGYPDGIPVLEHHGSHQPPPRDPTERQVIRAVEGAGIGVAVLVAVVLAGTAVVYLTHASSVRYRRLR

SEQ ID NO: 281 - protein, 480 aa, synthetic construct
  REGION 1..480: note = Synthetic Polypeptide
MALGRVGLAVGLWGLLWVGVVVVLANASPGRTITVGPRGNASNAAPSASPRNASAPRTTPTPPQPRKATKSKASTAKPAPPPKTGPPKTSSEPVRCNRHDPLARYGSRVQIRCRFPNSTRTESRLQIWRYATATDAEIGTAPSLEEVMVNVSAPPGGQLVYDSAPNRTDPHVIWAEGAGPGASPRLYSVVGPLGRQRLIIEELTLETQGMYYWVWGRTDRPSAYGTWVRVRVFRPPSLTIHPHAVLEGQPFKATCTAATYYPGNRAEFVWFEDGRRVFDPAQIHTQTQENPDGFSTVSTVTSAAVGGQGPPRTFTCQLTWHRDSVSFSRRNAAGTASVLPRPTITMEFTGDHAVCTAGCVPEGVTFAWFLGDDSSPAEKVAVASQTSCGRPGTATIRSTLPVSYEQTEYICRLAGYPDGIPVLEHHGSHQPPPRDPTERQVIRAVEGAGIGVAVLVAVVLAGTAVVYLTHASSVRYRRLR

SEQ ID NO: 282 - DNA, 1606 bp, synthetic construct
  misc_feature 1..1606: note = Synthetic Polynucleotide
  source 1..1606: mol_type = other DNA
gggaaataagagagaaaagaagagtaagaagaaatataagagccaccatggcccttggacgggtaggcctagccgtgggcctgtggggcctactgtgggtgggtgtggtcgtggtgctggccaatgcctcccccggacgcacgataacggtgggcccgcgaggcaacgcgagcaatgctgccccctccgcgtccccgcggaacgcatccgccccccgaaccacacccacgcccccacaaccccgcaaagcgacgaaatccaaggcctccaccgccaaaccggctccgccccccaagaccggacccccgaagacatcctcggagcccgtgcgatgcaaccgccacgacccgctggcccggtacggctcgcgggtgcaaatccgatgccggtttcccaactccacgaggactgagtcccgtctccagatctggcgttatgccacggcgacggacgccgaaatcggaacagcgcctagcttagaagaggtgatggtgaacgtgtcggccccgcccgggggccaactggtgtatgacagtgcccccaaccgaacggacccgcatgtaatctgggcggagggcgccggcccgggcgccagcccgcgcctgtactcggttgtcggcccgctgggtcggcagcggctcatcatcgaagagttaaccctggagacacagggcatgtactattgggtgtggggccggacggaccgcccgtccgcctacgggacctgggtccgcgttcgagtatttcgccctccgtcgctgaccatccacccccacgcggtgctggagggccagccgtttaaggcgacgtgcacggccgcaacctactacccgggcaaccgcgcggagttcgtctggtttgaggacggtcgccgcgtattcgatccggcacagatacacacgcagacgcaggagaaccccgacggcttttccaccgtctccaccgtgacctccgcggccgtcggcgggcagggcccccctcgcaccttcacctgccagctgacgtggcaccgcgactccgtgtcgttctctcggcgcaacgccagcggcacggcctcggttctgccgcggccgaccattaccatggagtttacaggcgaccatgcggtctgcacggccggctgtgtgcccgagggggtcacgtttgctgccttcctgggggatgactcctcgccggcggaaaaggtggccgtcgcgtcccagacatcgtgcgggcgccccggcaccgccacgatccgctccaccctgccggtctcgtacgagcagaccgagtacatctgtagactggcgggatacccggacggaattccggtcctagagcaccacggaagccaccagcccccgccgcgggacccaaccgagcggcaggtgatccgggcggtggagggggcggggatcggagtggctgtccttgtcgcggtggttctggccgggaccgcggtagtgtacctgacccatgcctcctcggtacgctatcgtcggctgcggtgataataggctggagcctcggtggcctagcttcttgccccttgggcctccccccagcccctcctccccttcctgcacccgtacccccgtggtctttgaataaagtctgagtgggcggc

SEQ ID NO: 283 - DNA, 1551 bp, synthetic construct
  misc_feature 1..1551: note = Synthetic Polynucleotide
  source 1..1551: mol_type = other DNA
tggacgggtaggcctagccgtgggcctgtggggcctactgtgggtgggtgtggtcgtggtgctggccaatgcctcccccggacgcacgataacggtgggcccgcgaggcaacgcgagcaatgctgccccctccgcgtccccgcggaacgcatccgccccccgaaccacacccacgcccccacaaccccgcaaagcgacgaaatccaaggcctccaccgccaaaccggctccgccccccaagaccggacccccgaagacatcctcggagcccgtgcgatgcaaccgccacgacccgctggcccggtacggctcgcgggtgcaaatccgatgccggtttcccaactccacgaggactgagtcccgtctccagatctggcgttatgccacggcgacggacgccgaaatcggaacagcgcctagcttagaagaggtgatggtgaacgtgtcggccccgcccgggggccaactggtgtatgacagtgcccccaaccgaacggacccgcatgtaatctgggcggagggcgccggcccgggcgccagcccgcgcctgtactcggttgtcggcccgctgggtcggcagcggctcatcatcgaagagttaaccctggagacacagggcatgtactattgggtgtggggccggacggaccgcccgtccgcctacgggacctgggtccgcgttcgagtatttcgccctccgtcgctgaccatccacccccacgcggtgctggagggccagccgtttaaggcgacgtgcacggccgcaacctactacccgggcaaccgcgcggagttcgtctggtttgaggacggtcgccgcgtattcgatccggcacagatacacacgcagacgcaggagaaccccgacggcttttccaccgtctccaccgtgacctccgcggccgtcggcgggcagggcccccctcgcaccttcacctgccagctgacgtggcaccgcgcctccgtgtcgttctctcggcgcaacgccagcggcacggcctcggttctgccgcggccgaccattaccatggagtttacaggcgaccatgcggtctgcacggccggctgtgtgcccgagggggtcacgtttgcttggttcctgggggatgactcctcgccggcggaaaaggtggccgtcgcgtcccagacatcgtgcgggcgccccggcaccgccacgatccgctccaccctgccggtctcgtacgagcagaccgagtacatctgtagactggcgggatacccggacggaattccggtcctagagcaccacggaagccaccagcccccgccgcgggacccaaccgagcggcaggtgatccgggcggtggagggggcggggatcggagtggctgtccttgtcgcggtggttctggccgggaccgcggtagtgtacctgacccatgcctcctcggtacgctatcgtcggctgcggtgataataggctggagcctcggtggcctagcttcttgccccttgggcctccccccagcccctcctccccttcctgcacccgtacccccgtggtctttgaataaagtctgagtgggcggc

SEQ ID NO: 284 - DNA, 1606 bp, synthetic construct
  misc_feature 1..1606: note = Synthetic Polynucleotide
  source 1..1606: mol_type = other DNA
gggaaataagagagaaaagaagagtaagaagaaatataagagccaccatggcccttggacgggtaggcctagccgtgggcctgtggggcctactgtgggtgggtgtggtcgtggtgctggccaatgcctcccccggacgcacgataacggtgggcccgcgaggcaacgcgagcaatgctgccccctccgcgtccccgcggaacgcatccgccccccgaaccacacccacgcccccacaaccccgcaaagcgacgaaatccaaggcctccaccgccaaaccggctccgccccccaagaccggacccccgaagacatcctcggagcccgtgcgatgcaaccgccacgacccgctggcccggtacggctcgcgggtgcaaatccgatgccggtttcccaactccacgaggactgagtcccgtctccagatctggcgttatgccacggcgacggacgccgaaatcggaacagcgcctagcttagaagaggtgatggtgaacgtgtcggccccgcccgggggccaactggtgtatgacagtgcccccaaccgaacggacccgcatgtaatctgggcggagggcgccggcccgggcgccagcccgcgcctgtactcggttgtcggcccgctgggtcggcagcggctcatcatcgaagagttaaccctggagacacagggcatgtactattgggtgtggggccggacggaccgcccgtccgcctacgggacctgggtccgcgttcgagtatttcgccctccgtcgctgaccatccacccccacgcggtgctggagggccagccgtttaaggcgacgtgcacggccgcaacctactacccgggcaaccgcgcggagttcgtctggtttgaggacggtcgccgcgtattcgatccggcacagatacacacgcagacgcaggagaaccccgacggcttttccaccgtctccaccgtgacctccgcggccgtcggcgggcagggcccccctcgcaccttcacctgccagctgacgtggcaccgcgactccgtgtcggcctctcggcgcaacgccagcggcacggcctcggttctgccgcggccgaccattaccatggagtttacaggcgaccatgcggtctgcacggccggctgtgtgcccgagggggtcacgtttgcttggttcctgggggatgactcctcgccggcggaaaaggtggccgtcgcgtcccagacatcgtgcgggcgccccggcaccgccacgatccgctccaccctgccggtctcgtacgagcagaccgagtacatctgtagactggcgggatacccggacggaattccggtcctagagcaccacggaagccaccagcccccgccgcgggacccaaccgagcggcaggtgatccgggcggtggagggggcggggatcggagtggctgtccttgtcgcggtggttctggccgggaccgcggtagtgtacctgacccatgcctcctcggtacgctatcgtcggctgcggtgataataggctggagcctcggtggcctagcttcttgccccttgggcctccccccagcccctcctccccttcctgcacccgtacccccgtggtctttgaataaagtctgagtgggcggc

SEQ ID NO: 285 - DNA, 1606 bp, synthetic construct
  misc_feature 1..1606: note = Synthetic Polynucleotide
  source 1..1606: mol_type = other DNA
gggaaataagagagaaaagaagagtaagaagaaatataagagccaccatggcccttggacgggtaggcctagccgtgggcctgtggggcctactgtgggtgggtgtggtcgtggtgctggccaatgcctcccccggacgcacgataacggtgggcccgcgaggcaacgcgagcaatgctgccccctccgcgtccccgcggaacgcatccgccccccgaaccacacccacgcccccacaaccccgcaaagcgacgaaatccaaggcctccaccgccaaaccggctccgccccccaagaccggacccccgaagacatcctcggagcccgtgcgatgcaaccgccacgacccgctggcccggtacggctcgcgggtgcaaatccgatgccggtttcccaactccacgaggactgagtcccgtctccagatctggcgttatgccacggcgacggacgccgaaatcggaacagcgcctagcttagaagaggtgatggtgaacgtgtcggccccgcccgggggccaactggtgtatgacagtgcccccaaccgaacggacccgcatgtaatctgggcggagggcgccggcccgggcgccagcccgcgcctgtactcggttgtcggcccgctgggtcggcagcggctcatcatcgaagagttaaccctggagacacagggcatgtactattgggtgtggggccggacggaccgcccgtccgcctacgggacctgggtccgcgttcgagtatttcgccctccgtcgctgaccatccacccccacgcggtgctggagggccagccgtttaaggcgacgtgcacggccgcaacctactacccgggcaaccgcgcggagttcgtctggtttgaggacggtcgccgcgtattcgatccggcacagatacacacgcagacgcaggagaaccccgacggcttttccaccgtctccaccgtgacctccgcggccgtcggcgggcagggcccccctcgcaccttcacctgccagctgacgtggcaccgcgactccgtgtcgttctctcggcgcaacgccgccggcacggcctcggttctgccgcggccgaccattaccatggagtttacaggcgaccatgcggtctgcacggccggctgtgtgcccgagggggtcacgtttgcttggttcctgggggatgactcctcgccggcggaaaaggtggccgtcgcgtcccagacatcgtgcgggcgccccggcaccgccacgatccgctccaccctgccggtctcgtacgagcagaccgagtacatctgtagactggcgggatacccggacggaattccggtcctagagcaccacggaagccaccagcccccgccgcgggacccaaccgagcggcaggtgatccgggcggtggagggggcggggatcggagtggctgtccttgtcgcggtggttctggccgggaccgcggtagtgtacctgacccatgcctcctcggtacgctatcgtcggctgcggtgataataggctggagcctcggtggcctagcttcttgccccttgggcctccccccagcccctcctccccttcctgcacccgtacccccgtggtctttgaataaagtctgagtgggcggc

SEQ ID NO: 286 - RNA, 1606 nt, synthetic construct
  misc_feature 1..1606: note = Synthetic Polynucleotide
  source 1..1606: mol_type = other RNA
gggaaataagagagaaaagaagagtaagaagaaatataagagccaccatggcccttggacgggtaggcctagccgtgggcctgtggggcctactgtgggtgggtgtggtcgtggtgctggccaatgcctcccccggacgcacgataacggtgggcccgcgaggcaacgcgagcaatgctgccccctccgcgtccccgcggaacgcatccgccccccgaaccacacccacgcccccacaaccccgcaaagcgacgaaatccaaggcctccaccgccaaaccggctccgccccccaagaccggacccccgaagacatcctcggagcccgtgcgatgcaaccgccacgacccgctggcccggtacggctcgcgggtgcaaatccgatgccggtttcccaactccacgaggactgagtcccgtctccagatctggcgttatgccacggcgacggacgccgaaatcggaacagcgcctagcttagaagaggtgatggtgaacgtgtcggccccgcccgggggccaactggtgtatgacagtgcccccaaccgaacggacccgcatgtaatctgggcggagggcgccggcccgggcgccagcccgcgcctgtactcggttgtcggcccgctgggtcggcagcggctcatcatcgaagagttaaccctggagacacagggcatgtactattgggtgtggggccggacggaccgcccgtccgcctacgggacctgggtccgcgttcgagtatttcgccctccgtcgctgaccatccacccccacgcggtgctggagggccagccgtttaaggcgacgtgcacggccgcaacctactacccgggcaaccgcgcggagttcgtctggtttgaggacggtcgccgcgtattcgatccggcacagatacacacgcagacgcaggagaaccccgacggcttttccaccgtctccaccgtgacctccgcggccgtcggcgggcagggcccccctcgcaccttcacctgccagctgacgtggcaccgcgactccgtgtcgttctctcggcgcaacgccagcggcacggcctcggttctgccgcggccgaccattaccatggagtttacaggcgaccatgcggtctgcacggccggctgtgtgcccgagggggtcacgtttgctgccttcctgggggatgactcctcgccggcggaaaaggtggccgtcgcgtcccagacatcgtgcgggcgccccggcaccgccacgatccgctccaccctgccggtctcgtacgagcagaccgagtacatctgtagactggcgggatacccggacggaattccggtcctagagcaccacggaagccaccagcccccgccgcgggacccaaccgagcggcaggtgatccgggcggtggagggggcggggatcggagtggctgtccttgtcgcggtggttctggccgggaccgcggtagtgtacctgacccatgcctcctcggtacgctatcgtcggctgcggtgataataggctggagcctcggtggcctagcttcttgccccttgggcctccccccagcccctcctccccttcctgcacccgtacccccgtggtctttgaataaagtctgagtgggcggc

SEQ ID NO: 287 - RNA, 1606 nt, synthetic construct
  misc_feature 1..1606: note = Synthetic Polynucleotide
  source 1..1606: mol_type = other RNA
gggaaataagagagaaaagaagagtaagaagaaatataagagccaccatggcccttggacgggtaggcctagccgtgggcctgtggggcctactgtgggtgggtgtggtcgtggtgctggccaatgcctcccccggacgcacgataacggtgggcccgcgaggcaacgcgagcaatgctgccccctccgcgtccccgcggaacgcatccgccccccgaaccacacccacgcccccacaaccccgcaaagcgacgaaatccaaggcctccaccgccaaaccggctccgccccccaagaccggacccccgaagacatcctcggagcccgtgcgatgcaaccgccacgacccgctggcccggtacggctcgcgggtgcaaatccgatgccggtttcccaactccacgaggactgagtcccgtctccagatctggcgttatgccacggcgacggacgccgaaatcggaacagcgcctagcttagaagaggtgatggtgaacgtgtcggccccgcccgggggccaactggtgtatgacagtgcccccaaccgaacggacccgcatgtaatctgggcggagggcgccggcccgggcgccagcccgcgcctgtactcggttgtcggcccgctgggtcggcagcggctcatcatcgaagagttaaccctggagacacagggcatgtactattgggtgtggggccggacggaccgcccgtccgcctacgggacctgggtccgcgttcgagtatttcgccctccgtcgctgaccatccacccccacgcggtgctggagggccagccgtttaaggcgacgtgcacggccgcaacctactacccgggcaaccgcgcggagttcgtctggtttgaggacggtcgccgcgtattcgatccggcacagatacacacgcagacgcaggagaaccccgacggcttttccaccgtctccaccgtgacctccgcggccgtcggcgggcagggcccccctcgcaccttcacctgccagctgacgtggcaccgcgcctccgtgtcgttctctcggcgcaacgccagcggcacggcctcggttctgccgcggccgaccattaccatggagtttacaggcgaccatgcggtctgcacggccggctgtgtgcccgagggggtcacgtttgcttggttcctgggggatgactcctcgccggcggaaaaggtggccgtcgcgtcccagacatcgtgcgggcgccccggcaccgccacgatccgctccaccctgccggtctcgtacgagcagaccgagtacatctgtagactggcgggatacccggacggaattccggtcctagagcaccacggaagccaccagcccccgccgcgggacccaaccgagcggcaggtgatccgggcggtggagggggcggggatcggagtggctgtccttgtcgcggtggttctggccgggaccgcggtagtgtacctgacccatgcctcctcggtacgctatcgtcggctgcggtgataataggctggagcctcggtggcctagcttcttgccccttgggcctccccccagcccctcctccccttcctgcacccgtacccccgtggtctttgaataaagtctgagtgggcggc

SEQ ID NO: 288 - RNA, 1606 nt, synthetic construct
  misc_feature 1..1606: note = Synthetic Polynucleotide
  source 1..1606: mol_type = other RNA
gggaaataagagagaaaagaagagtaagaagaaatataagagccaccatggcccttggacgggtaggcctagccgtgggcctgtggggcctactgtgggtgggtgtggtcgtggtgctggccaatgcctcccccggacgcacgataacggtgggcccgcgaggcaacgcgagcaatgctgccccctccgcgtccccgcggaacgcatccgccccccgaaccacacccacgcccccacaaccccgcaaagcgacgaaatccaaggcctccaccgccaaaccggctccgccccccaagaccggacccccgaagacatcctcggagcccgtgcgatgcaaccgccacgacccgctggcccggtacggctcgcgggtgcaaatccgatgccggtttcccaactccacgaggactgagtcccgtctccagatctggcgttatgccacggcgacggacgccgaaatcggaacagcgcctagcttagaagaggtgatggtgaacgtgtcggccccgcccgggggccaactggtgtatgacagtgcccccaaccgaacggacccgcatgtaatctgggcggagggcgccggcccgggcgccagcccgcgcctgtactcggttgtcggcccgctgggtcggcagcggctcatcatcgaagagttaaccctggagacacagggcatgtactattgggtgtggggccggacggaccgcccgtccgcctacgggacctgggtccgcgttcgagtatttcgccctccgtcgctgaccatccacccccacgcggtgctggagggccagccgtttaaggcgacgtgcacggccgcaacctactacccgggcaaccgcgcggagttcgtctggtttgaggacggtcgccgcgtattcgatccggcacagatacacacgcagacgcaggagaaccccgacggcttttccaccgtctccaccgtgacctccgcggccgtcggcgggcagggcccccctcgcaccttcacctgccagctgacgtggcaccgcgactccgtgtcggcctctcggcgcaacgccagcggcacggcctcggttctgccgcggccgaccattaccatggagtttacaggcgaccatgcggtctgcacggccggctgtgtgcccgagggggtcacgtttgcttggttcctgggggatgactcctcgccggcggaaaaggtggccgtcgcgtcccagacatcgtgcgggcgccccggcaccgccacgatccgctccaccctgccggtctcgtacgagcagaccgagtacatctgtagactggcgggatacccggacggaattccggtcctagagcaccacggaagccaccagcccccgccgcgggacccaaccgagcggcaggtgatccgggcggtggagggggcggggatcggagtggctgtccttgtcgcggtggttctggccgggaccgcggtagtgtacctgacccatgcctcctcggtacgctatcgtcggctgcggtgataataggctggagcctcggtggcctagcttcttgccccttgggcctccccccagcccctcctccccttcctgcacccgtacccccgtggtctttgaataaagtctgagtgggcggc

SEQ ID NO: 289 - RNA, 1606 nt, synthetic construct
  misc_feature 1..1606: note = Synthetic Polynucleotide
  source 1..1606: mol_type = other RNA
gggaaataagagagaaaagaagagtaagaagaaatataagagccaccatggcccttggacgggtaggcctagccgtgggcctgtggggcctactgtgggtgggtgtggtcgtggtgctggccaatgcctcccccggacgcacgataacggtgggcccgcgaggcaacgcgagcaatgctgccccctccgcgtccccgcggaacgcatccgccccccgaaccacacccacgcccccacaaccccgcaaagcgacgaaatccaaggcctccaccgccaaaccggctccgccccccaagaccggacccccgaagacatcctcggagcccgtgcgatgcaaccgccacgacccgctggcccggtacggctcgcgggtgcaaatccgatgccggtttcccaactccacgaggactgagtcccgtctccagatctggcgttatgccacggcgacggacgccgaaatcggaacagcgcctagcttagaagaggtgatggtgaacgtgtcggccccgcccgggggccaactggtgtatgacagtgcccccaaccgaacggacccgcatgtaatctgggcggagggcgccggcccgggcgccagcccgcgcctgtactcggttgtcggcccgctgggtcggcagcggctcatcatcgaagagttaaccctggagacacagggcatgtactattgggtgtggggccggacggaccgcccgtccgcctacgggacctgggtccgcgttcgagtatttcgccctccgtcgctgaccatccacccccacgcggtgctggagggccagccgtttaaggcgacgtgcacggccgcaacctactacccgggcaaccgcgcggagttcgtctggtttgaggacggtcgccgcgtattcgatccggcacagatacacacgcagacgcaggagaaccccgacggcttttccaccgtctccaccgtgacctccgcggccgtcggcgggcagggcccccctcgcaccttcacctgccagctgacgtggcaccgcgactccgtgtcgttctctcggcgcaacgccgccggcacggcctcggttctgccgcggccgaccattaccatggagtttacaggcgaccatgcggtctgcacggccggctgtgtgcccgagggggtcacgtttgcttggttcctgggggatgactcctcgccggcggaaaaggtggccgtcgcgtcccagacatcgtgcgggcgccccggcaccgccacgatccgctccaccctgccggtctcgtacgagcagaccgagtacatctgtagactggcgggatacccggacggaattccggtcctagagcaccacggaagccaccagcccccgccgcgggacccaaccgagcggcaggtgatccgggcggtggagggggcggggatcggagtggctgtccttgtcgcggtggttctggccgggaccgcggtagtgtacctgacccatgcctcctcggtacgctatcgtcggctgcggtgataataggctggagcctcggtggcctagcttcttgccccttgggcctccccccagcccctcctccccttcctgcacccgtacccccgtggtctttgaataaagtctgagtgggcggc

SEQ ID NO: 290 - DNA, 2080 bp, Varicella Zoster Virus
  source 1..2080: mol_type = genomic DNA
tcaagcttttggaccctcgtacagaagctaatacgactcactatagggaaataagagagaaaagaagagtaagaagaaatataagagccaccatggggacagtgaataagccggttgtgggcgtgcttatgggctttgggattattaccggtacattacgaattaccaatccagtgcgcgccagtgtgctgcgttacgacgactttcacattgacgaggataagctggatactaacagcgtgtacgaaccttattaccactcagatcatgccgaatcaagctgggttaatagaggagaaagcagccgaaaagcctacgaccacaactcaccttatatttggcccagaaacgattatgacggtttcctggaaaacgcacatgaacaccatggagtctacaaccaaggcaggggaatcgacagtggcgagcgtcttatgcagccaacacagatgtcggcacaggaggatctcggtgatgacaccggcatacacgtgattcccacattaaacggcgacgacagacataagatcgtcaatgtggatcagcgtcagtatggggatgtctttaaaggcgatttgaatccaaagccccaaggacagagactgatcgaggtctctgtagaagaaaatcaccccttcactttgcgcgctccaatccagaggatttacggggtgcgttataccgaaacttggagtttcttgccgtcactgacgtgtacgggggatgccgcccccgcaatccagcacatctgtctgaaacacaccacatgctttcaggacgtggttgtggatgtggattgcgcggaaaacacaaaagaagaccaactcgccgaaatcagctatcgttttcagggtaaaaaagaggccgaccaaccgtggattgttgtgaatacgagcacgctcttcgatgagcttgaactcgatcccccggaaatcgagcctggggttctaaaagtgttgaggaccgagaagcagtacctcggggtttatatctggaatatgagaggctccgatggcacctctacctacgcaacgtttctggttacctggaagggagacgagaagacacggaatccaacgcccgctgtgacccctcagcctaggggagccgaattccacatgtggaactatcactcccatgtattcagtgtgggtgacactttcagcctggccatgcacctgcagtataagattcacgaggcacccttcgacctcctgctggagtggttgtacgtacctattgatcccacttgtcagcccatgcgcctgtactccacttgcttgtaccaccccaatgcaccacagtgtctatcacacatgaactccgggtgtacctttacttcaccccatcttgcccagcgggtcgccagcacagtgtatcagaactgtgagcatgctgacaactatactgcttattgcctcggaatatcccatatggagccaagcttcgggctcatactgcacgatggtggtacgacactcaagttcgtggacacccccgaaagcctttctggcttgtacgtgttcgtggtctacttcaatggacatgtggaggcagtggcttacacagtggtttcgacagttgatcactttgtaaatgccattgaggaacgcggcttcccgcctacagcgggccagccccctgcgacaacaaaaccaaaagagattacgcccgttaatcctgggactagtccattgctgaggtatgccgcctggactggcggtctggcggccgtggtacttctgtgtttagtcatatttctgatctgtaccgctaaacgtatgcgggtcaaggcttaccgtgttgacaagtctccttacaatcagtcaatgtactatgcaggactccctgttgacgatttcgaagactcagagagtacagacacagaagaagaattcggaaacgctataggtggctctcacggaggtagctcgtatacagtgtacatcgataaaaccagatgataataggctggagcctcggtggccatgcttcttgccccttgggcctccccccagcccctcctccccttcctgcacccgtacccccgtggtctttgaataaagtctgagtgggcggc

SEQ ID NO: 291 - DNA, 1276 bp, Varicella Zoster Virus
  source 1..1276: mol_type = genomic DNA
tcaagcttttggaccctcgtacagaagctaatacgactcactatagggaaataagagagaaaagaagagtaagaagaaatataagagccaccatgtttttaatccaatgtttgatatcggccgttatattttacatacaagtgaccaacgctttgatcttcaagggcgaccacgtgagcttgcaagttaacagcagtctcacgtctatccttattcccatgcaaaatgataattatacagagataaaaggacagcttgtctttattggagagcaactacctaccgggacaaactatagcggaacactggaactgttatacgcggatacggtggcgttttgtttccggtcagtacaagtaataagatacgacggatgtccccggattagaacgagcgcttttatttcgtgtaggtacaaacattcgtggcattatggtaactcaacggatcggatatcaacagagccggatgctggtgtaatgttgaaaattaccaaaccgggaataaatgatgctggtgtgtatgtacttcttgttcggttagaccatagcagatccaccgatggtttcattcttggtgtaaatgtatatacagcgggctcgcatcacaacattcacggggttatctacacttctccatctctacagaatggatattctacaagagccctttttcaacaagctcgtttgtgtgatttacccgcgacacccaaagggtccggtacctccctgtttcaacatatgcttgatcttcgtgccggtaaatcgttagaggataacccttggttacatgaggacgttgttacgacagaaactaagtccgttgttaaggaggggatagaaaatcacgtatatccaacggatatgtccacgttacccgaaaagtcccttaatgatcctccagaaaatctacttataattattcctatagtagcgtctgtcatgatcctcaccgccatggttattgttattgtaataagcgttaagcgacgtagaattaaaaaacatccaatttatcgcccaaatacaaaaacaagaaggggcatacaaaatgcgacaccagaatccgatgtgatgttggaggccgccattgcacaactagcaacgattcgcgaagaatcccccccacattccgttgtaaacccgtttgttaaatagtgataataggctggagcctcggtggccatgcttcttgccccttgggcctccccccagcccctcctccccttcctgcacccgtacccccgtggtctttgaataaagtctgagtgggcggc

SEQ ID NO: 292 - DNA, 1897 bp, synthetic construct
  misc_feature 1..1897: note = Synthetic Polynucleotide
  source 1..1897: mol_type = other DNA
tcaagcttttggaccctcgtacagaagctaatacgactcactatagggaaataagagagaaaagaagagtaagaagaaatataagagccaccatggggacagttaataaacctgtggtgggggtattgatggggttcggaattatcacgggaacgttgcgtataacgaatccggtcagagcatccgtcttgcgatacgatgattttcacatcgatgaagacaaactggatacaaactccgtatatgagccttactaccattcagatcatgcggagtcttcatgggtaaatcggggagagtcttcgcgaaaagcgtacgatcataactcaccttatatatggccacgtaatgattatgatggatttttagagaacgcacacgaacaccatggggtgtataatcagggccgtggtatcgatagcggggaacggttaatgcaacccacacaaatgtctgcacaggaggatcttggggacgatacgggcatccacgttatccctacgttaaacggcgatgacagacataaaattgtaaatgtggaccaacgtcaatacggtgacgtgtttaaaggagatcttaatccaaaaccccaaggccaaagactcattgaggtgtcagtggaagaaaatcacccgtttactttacgcgcaccgattcagcggatttatggagtccggtacaccgagacttggagctttttgccgtcattaacctgtacgggagacgcagcgcccgccatccagcatatatgtttaaaacatacaacatgctttcaagacgtggtggtggatgtggattgcgcggaaaatactaaagaggatcagttggccgaaatcagttaccgttttcaaggtaagaaggaagcggaccaaccgtggattgttgtaaacacgagcacactgtttgatgaactcgaattagacccccccgagattgaaccgggtgtcttgaaagtacttcggacagaaaaacaatacttgggtgtgtacatttggaacatgcgcggctccgatggtacgtctacctacgccacgtttttggtcacctggaaaggggatgaaaaaacaagaaaccctacgcccgcagtaactcctcaaccaagaggggctgagtttcatatgtggaattaccactcgcatgtattttcagttggtgatacgtttagcttggcaatgcatcttcagtataagatacatgaagcgccatttgatttgctgttagagtggttgtatgtccccatcgatcctacatgtcaaccaatgcggttatattctacgtgtttgtatcatcccaacgcaccccaatgcctctctcatatgaattccggttgtacatttacctcgccacatttagcccagcgtgttgcaagcacagtgtatcaaaattgtgaacatgcagataactacaccgcatattgtctgggaatatctcatatggagcctagctttggtctaatcttacacgacgggggcaccacgttaaagtttgtagatacacccgagagtttgtcgggattatacgtttttgtggtgtattttaacgggcatgttgaagccgtagcatacactgttgtatccacagtagatcattttgtaaacgcaattgaagagcgtggatttccgccaacggccggtcagccaccggcgactactaaacccaaggaaattacccccgtaaaccccggaacgtcaccacttctacgatatgccgcatggaccggagggcttgcagcagtagtacttttatgtctcgtaatatttttaatctgtacggcttgatgataataggctggagcctcggtggccatgcttcttgccccttgggcctccccccagcccctcctccccttcctgcacccgtacccccgtggtctttgaataaagtctgagtgggcggc

SEQ ID NO: 293 - DNA, 1867 bp, synthetic construct
  misc_feature 1..1867: note = Synthetic Polynucleotide
  source 1..1867: mol_type = other DNA
tcaagcttttggaccctcgtacagaagctaatacgactcactatagggaaataagagagaaaagaagagtaagaagaaatataagagccaccatggaaaccccggcgcagctgctgtttctgctgctgctgtggctgccggataccaccggctccgtcttgcgatacgatgattttcacatcgatgaagacaaactggatacaaactccgtatatgagccttactaccattcagatcatgcggagtcttcatgggtaaatcggggagagtcttcgcgaaaagcgtacgatcataactcaccttatatatggccacgtaatgattatgatggatttttagagaacgcacacgaacaccatggggtgtataatcagggccgtggtatcgatagcggggaacggttaatgcaacccacacaaatgtctgcacaggaggatcttggggacgatacgggcatccacgttatccctacgttaaacggcgatgacagacataaaattgtaaatgtggaccaacgtcaatacggtgacgtgtttaaaggagatcttaatccaaaaccccaaggccaaagactcattgaggtgtcagtggaagaaaatcacccgtttactttacgcgcaccgattcagcggatttatggagtccggtacaccgagacttggagctttttgccgtcattaacctgtacgggagacgcagcgcccgccatccagcatatatgtttaaaacatacaacatgctttcaagacgtggtggtggatgtggattgcgcggaaaatactaaagaggatcagttggccgaaatcagttaccgttttcaaggtaagaaggaagcggaccaaccgtggattgttgtaaacacgagcacactgtttgatgaactcgaattagacccccccgagattgaaccgggtgtcttgaaagtacttcggacagaaaaacaatacttgggtgtgtacatttggaacatgcgcggctccgatggtacgtctacctacgccacgtttttggtcacctggaaaggggatgaaaaaacaagaaaccctacgcccgcagtaactcctcaaccaagaggggctgagtttcatatgtggaattaccactcgcatgtattttcagttggtgatacgtttagcttggcaatgcatcttcagtataagatacatgaagcgccatttgatttgctgttagagtggttgtatgtccccatcgatcctacatgtcaaccaatgcggttatattctacgtgtttgtatcatcccaacgcaccccaatgcctctctcatatgaattccggttgtacatttacctcgccacatttagcccagcgtgttgcaagcacagtgtatcaaaattgtgaacatgcagataactacaccgcatattgtctgggaatatctcatatggagcctagctttggtctaatcttacacgacgggggcaccacgttaaagtttgtagatacacccgagagtttgtcgggattatacgtttttgtggtgtattttaacgggcatgttgaagccgtagcatacactgttgtatccacagtagatcattttgtaaacgcaattgaagagcgtggatttccgccaacggccggtcagccaccggcgactactaaacccaaggaaattacccccgtaaaccccggaacgtcaccacttctacgatatgccgcatggaccggagggcttgcagcagtagtacttttatgtctcgtaatatttttaatctgtacggcttgatgataataggctggagcctcggtggccatgcttcttgccccttgggcctccccccagcccctcctccccttcctgcacccgtacccccgtggtctttgaataaagtctgagtgggcggc

SEQ ID NO: 294 - DNA, 1933 bp, synthetic construct
  misc_feature 1..1933: note = Synthetic Polynucleotide
  source 1..1933: mol_type = other DNA
tcaagcttttggaccctcgtacagaagctaatacgactcactatagggaaataagagagaaaagaagagtaagaagaaatataagagccaccatggggacagttaataaacctgtggtgggggtattgatggggttcggaattatcacgggaacgttgcgtataacgaatccggtcagagcatccgtcttgcgatacgatgattttcacatcgatgaagacaaactggatacaaactccgtatatgagccttactaccattcagatcatgcggagtcttcatgggtaaatcggggagagtcttcgcgaaaagcgtacgatcataactcaccttatatatggccacgtaatgattatgatggatttttagagaacgcacacgaacaccatggggtgtataatcagggccgtggtatcgatagcggggaacggttaatgcaacccacacaaatgtctgcacaggaggatcttggggacgatacgggcatccacgttatccctacgttaaacggcgatgacagacataaaattgtaaatgtggaccaacgtcaatacggtgacgtgtttaaaggagatcttaatccaaaaccccaaggccaaagactcattgaggtgtcagtggaagaaaatcacccgtttactttacgcgcaccgattcagcggatttatggagtccggtacaccgagacttggagctttttgccgtcattaacctgtacgggagacgcagcgcccgccatccagcatatatgtttaaaacatacaacatgctttcaagacgtggtggtggatgtggattgcgcggaaaatactaaagaggatcagttggccgaaatcagttaccgttttcaaggtaagaaggaagcggaccaaccgtggattgttgtaaacacgagcacactgtttgatgaactcgaattagacccccccgagattgaaccgggtgtcttgaaagtacttcggacagaaaaacaatacttgggtgtgtacatttggaacatgcgcggctccgatggtacgtctacctacgccacgtttttggtcacctggaaaggggatgaaaaaacaagaaaccctacgcccgcagtaactcctcaaccaagaggggctgagtttcatatgtggaattaccactcgcatgtattttcagttggtgatacgtttagcttggcaatgcatcttcagtataagatacatgaagcgccatttgatttgctgttagagtggttgtatgtccccatcgatcctacatgtcaaccaatgcggttatattctacgtgtttgtatcatcccaacgcaccccaatgcctctctcatatgaattccggttgtacatttacctcgccacatttagcccagcgtgttgcaagcacagtgtatcaaaattgtgaacatgcagataactacaccgcatattgtctgggaatatctcatatggagcctagctttggtctaatcttacacgacgggggcaccacgttaaagtttgtagatacacccgagagtttgtcgggattatacgtttttgtggtgtattttaacgggcatgttgaagccgtagcatacactgttgtatccacagtagatcattttgtaaacgcaattgaagagcgtggatttccgccaacggccggtcagccaccggcgactactaaacccaaggaaattacccccgtaaaccccggaacgtcaccacttctacgatatgccgcatggaccggagggcttgcagcagtagtacttttatgtctcgtaatatttttaatctgtacggctaaacgaatgagggttaaagcctatagggtagacaagtgatgataataggctggagcctcggtggccatgcttcttgccccttgggcctccccccagcccctcctccccttcctgcacccgtacccccgtggtctttgaataaagtctgagtgggcggc

SEQ ID NO: 295 - DNA, 1933 bp, synthetic construct
  misc_feature 1..1933: note = Synthetic Polynucleotide
  source 1..1933: mol_type = other DNA
tcaagcttttggaccctcgtacagaagctaatacgactcactatagggaaataagagagaaaagaagagtaagaagaaatataagagccaccatggggacagttaataaacctgtggtgggggtattgatggggttcggaattatcacgggaacgttgcgtataacgaatccggtcagagcatccgtcttgcgatacgatgattttcacatcgatgaagacaaactggatacaaactccgtatatgagccttactaccattcagatcatgcggagtcttcatgggtaaatcggggagagtcttcgcgaaaagcgtacgatcataactcaccttatatatggccacgtaatgattatgatggatttttagagaacgcacacgaacaccatggggtgtataatcagggccgtggtatcgatagcggggaacggttaatgcaacccacacaaatgtctgcacaggaggatcttggggacgatacgggcatccacgttatccctacgttaaacggcgatgacagacataaaattgtaaatgtggaccaacgtcaatacggtgacgtgtttaaaggagatcttaatccaaaaccccaaggccaaagactcattgaggtgtcagtggaagaaaatcacccgtttactttacgcgcaccgattcagcggatttatggagtccggtacaccgagacttggagctttttgccgtcattaacctgtacgggagacgcagcgcccgccatccagcatatatgtttaaaacatacaacatgctttcaagacgtggtggtggatgtggattgcgcggaaaatactaaagaggatcagttggccgaaatcagttaccgttttcaaggtaagaaggaagcggaccaaccgtggattgttgtaaacacgagcacactgtttgatgaactcgaattagacccccccgagattgaaccgggtgtcttgaaagtacttcggacagaaaaacaatacttgggtgtgtacatttggaacatgcgcggctccgatggtacgtctacctacgccacgtttttggtcacctggaaaggggatgaaaaaacaagaaaccctacgcccgcagtaactcctcaaccaagaggggctgagtttcatatgtggaattaccactcgcatgtattttcagttggtgatacgtttagcttggcaatgcatcttcagtataagatacatgaagcgccatttgatttgctgttagagtggttgtatgtccccatcgatcctacatgtcaaccaatgcggttatattctacgtgtttgtatcatcccaacgcaccccaatgcctctctcatatgaattccggttgtacatttacctcgccacatttagcccagcgtgttgcaagcacagtgtatcaaaattgtgaacatgcagataactacaccgcatattgtctgggaatatctcatatggagcctagctttggtctaatcttacacgacgggggcaccacgttaaagtttgtagatacacccgagagtttgtcgggattatacgtttttgtggtgtattttaacgggcatgttgaagccgtagcatacactgttgtatccacagtagatcattttgtaaacgcaattgaagagcgtggatttccgccaacggccggtcagccaccggcgactactaaacccaaggaaattacccccgtaaaccccggaacgtcaccacttctacgatatgccgcatggaccggagggcttgcagcagtagtacttttatgtctcgtaatatttttaatctgtacggctaaacgaatgagggttaaagccgccagggtagacaagtgatgataataggctggagcctcggtggccatgcttcttgccccttgggcctccccccagcccctcctccccttcctgcacccgtacccccgtggtctttgaataaagtctgagtgggcggc

SEQ ID NO: 296 - DNA, 2083 bp, synthetic construct
  misc_feature 1..2083: note = Synthetic Polynucleotide
  source 1..2083: mol_type = other DNA
tcaagcttttggaccctcgtacagaagctaatacgactcactatagggaaataagagagaaaagaagagtaagaagaaatataagagccaccatggggacagttaataaacctgtggtgggggtattgatggggttcggaattatcacgggaacgttgcgtataacgaatccggtcagagcatccgtcttgcgatacgatgattttcacatcgatgaagacaaactggatacaaactccgtatatgagccttactaccattcagatcatgcggagtcttcatgggtaaatcggggagagtcttcgcgaaaagcgtacgatcataactcaccttatatatggccacgtaatgattatgatggatttttagagaacgcacacgaacaccatggggtgtataatcagggccgtggtatcgatagcggggaacggttaatgcaacccacacaaatgtctgcacaggaggatcttggggacgatacgggcatccacgttatccctacgttaaacggcgatgacagacataaaattgtaaatgtggaccaacgtcaatacggtgacgtgtttaaaggagatcttaatccaaaaccccaaggccaaagactcattgaggtgtcagtggaagaaaatcacccgtttactttacgcgcaccgattcagcggatttatggagtccggtacaccgagacttggagctttttgccgtcattaacctgtacgggagacgcagcgcccgccatccagcatatatgtttaaaacatacaacatgctttcaagacgtggtggtggatgtggattgcgcggaaaatactaaagaggatcagttggccgaaatcagttaccgttttcaaggtaagaaggaagcggaccaaccgtggattgttgtaaacacgagcacactgtttgatgaactcgaattagacccccccgagattgaaccgggtgtcttgaaagtacttcggacagaaaaacaatacttgggtgtgtacatttggaacatgcgcggctccgatggtacgtctacctacgccacgtttttggtcacctggaaaggggatgaaaaaacaagaaaccctacgcccgcagtaactcctcaaccaagaggggctgagtttcatatgtggaattaccactcgcatgtattttcagttggtgatacgtttagcttggcaatgcatcttcagtataagatacatgaagcgccatttgatttgctgttagagtggttgtatgtccccatcgatcctacatgtcaaccaatgcggttatattctacgtgtttgtatcatcccaacgcaccccaatgcctctctcatatgaattccggttgtacatttacctcgccacatttagcccagcgtgttgcaagcacagtgtatcaaaattgtgaacatgcagataactacaccgcatattgtctgggaatatctcatatggagcctagctttggtctaatcttacacgacgggggcaccacgttaaagtttgtagatacacccgagagtttgtcgggattatacgtttttgtggtgtattttaacgggcatgttgaagccgtagcatacactgttgtatccacagtagatcattttgtaaacgcaattgaagagcgtggatttccgccaacggccggtcagccaccggcgactactaaacccaaggaaattacccccgtaaaccccggaacgtcaccacttctacgatatgccgcatggaccggagggcttgcagcagtagtacttttatgtctcgtaatatttttaatctgtacggctaaacgaatgagggttaaagcctatagggtagacaagtccccgtataaccaaagcatgtattacgctggccttccagtggacgatttcgaggacgccgaagccgccgatgccgaagaagagtttggtaacgcgattggagggagtcacgggggttcgagttacacggtgtatatagataagacccggtgatgataataggctggagcctcggtggccatgcttcttgccccttgggcctccccccagcccctcctccccttcctgcacccgtacccccgtggtctttgaataaagtctgagtgggcggc

SEQ ID NO: 297 - DNA, 2083 bp, synthetic construct
  misc_feature 1..2083: note = Synthetic Polynucleotide
  source 1..2083: mol_type = other DNA
tcaagcttttggaccctcgtacagaagctaatacgactcactatagggaaataagagagaaaagaagagtaagaagaaatataagagccaccatggggacagttaataaacctgtggtgggggtattgatggggttcggaattatcacgggaacgttgcgtataacgaatccggtcagagcatccgtcttgcgatacgatgattttcacatcgatgaagacaaactggatacaaactccgtatatgagccttactaccattcagatcatgcggagtcttcatgggtaaatcggggagagtcttcgcgaaaagcgtacgatcataactcaccttatatatggccacgtaatgattatgatggatttttagagaacgcacacgaacaccatggggtgtataatcagggccgtggtatcgatagcggggaacggttaatgcaacccacacaaatgtctgcacaggaggatcttggggacgatacgggcatccacgttatccctacgttaaacggcgatgacagacataaaattgtaaatgtggaccaacgtcaatacggtgacgtgtttaaaggagatcttaatccaaaaccccaaggccaaagactcattgaggtgtcagtggaagaaaatcacccgtttactttacgcgcaccgattcagcggatttatggagtccggtacaccgagacttggagctttttgccgtcattaacctgtacgggagacgcagcgcccgccatccagcatatatgtttaaaacatacaacatgctttcaagacgtggtggtggatgtggattgcgcggaaaatactaaagaggatcagttggccgaaatcagttaccgttttcaaggtaagaaggaagcggaccaaccgtggattgttgtaaacacgagcacactgtttgatgaactcgaattagacccccccgagattgaaccgggtgtcttgaaagtacttcggacagaaaaacaatacttgggtgtgtacatttggaacatgcgcggctccgatggtacgtctacctacgccacgtttttggtcacctggaaaggggatgaaaaaacaagaaaccctacgcccgcagtaactcctcaaccaagaggggctgagtttcatatgtggaattaccactcgcatgtattttcagttggtgatacgtttagcttggcaatgcatcttcagtataagatacatgaagcgccatttgatttgctgttagagtggttgtatgtccccatcgatcctacatgtcaaccaatgcggttatattctacgtgtttgtatcatcccaacgcaccccaatgcctctctcatatgaattccggttgtacatttacctcgccacatttagcccagcgtgttgcaagcacagtgtatcaaaattgtgaacatgcagataactacaccgcatattgtctgggaatatctcatatggagcctagctttggtctaatcttacacgacgggggcaccacgttaaagtttgtagatacacccgagagtttgtcgggattatacgtttttgtggtgtattttaacgggcatgttgaagccgtagcatacactgttgtatccacagtagatcattttgtaaacgcaattgaagagcgtggatttccgccaacggccggtcagccaccggcgactactaaacccaaggaaattacccccgtaaaccccggaacgtcaccacttctacgatatgccgcatggaccggagggcttgcagcagtagtacttttatgtctcgtaatatttttaatctgtacggctaaacgaatgagggttaaagcctatagggtagacaagtccccgtataaccaaagcatgtatggcgctggccttccagtggacgatttcgaggacgccgaagccgccgatgccgaagaagagtttggtaacgcgattggagggagtcacgggggttcgagttacacggtgtatatagataagacccggtgatgataataggctggagcctcggtggccatgcttcttgccccttgggcctccccccagcccctcctccccttcctgcacccgtacccccgtggtctttgaataaagtctgagtgggcggc

SEQ ID NO: 298 - protein, 623 aa, synthetic construct
  REGION 1..623: note = Synthetic Polypeptide
MGTVNKPVVGVLMGFGIITGTLRITNPVRASVLRYDDFHIDEDKLDTNSVYEPYYHSDHAESSWVNRGESSRKAYDHNSPYIWPRNDYDGFLENAHEHHGVYNQGRGIDSGERLMQPTQMSAQEDLGDDTGIHVIPTLNGDDRHKIVNVDQRQYGDVFKGDLNPKPQGQRLIEVSVEENHPFTLRAPIQRIYGVRYTETWSFLPSLTCTGDAAPAIQHICLKHTTCFQDVVVDVDCAENTKEDQLAEISYRFQGKKEADQPWIVVNTSTLFDELELDPPEIEPGVLKVLRTEKQYLGVYIWNMRGSDGTSTYATFLVTWKGDEKTRNPTPAVTPQPRGAEFHMWNYHSHVFSVGDTFSLAMHLQYKIHEAPFDLLLEWLYVPIDPTCQPMRLYSTCLYHPNAPQCLSHMNSGCTFTSPHLAQRVASTVYQNCEHADNYTAYCLGISHMEPSFGLILHDGGTTLKFVDTPESLSGLYVFVVYFNGHVEAVAYTVVSTVDHFVNAIEERGFPPTAGQPPATTKPKEITPVNPGTSPLLRYAAWTGGLAAVVLLCLVIFLICTAKRMRVKAYRVDKSPYNQSMYYAGLPVDDFEDSESTDTEEEFGNAIGGSHGGSSYTVYIDKTR

SEQ ID NO: 299 - protein, 613 aa, synthetic construct
  REGION 1..613: note = Synthetic Polypeptide
METPAQLLFLLLLWLPDTTGSVLRYDDFHIDEDKLDTNSVYEPYYHSDHAESSWVNRGESSRKAYDHNSPYIWPRNDYDGFLENAHEHHGVYNQGRGIDSGERLMQPTQMSAQEDLGDDTGIHVIPTLNGDDRHKIVNVDQRQYGDVFKGDLNPKPQGQRLIEVSVEENHPFTLRAPIQRIYGVRYTETWSFLPSLTCTGDAAPAIQHICLKHTTCFQDVVVDVDCAENTKEDQLAEISYRFQGKKEADQPWIVVNTSTLFDELELDPPEIEPGVLKVLRTEKQYLGVYIWNMRGSDGTSTYATFLVTWKGDEKTRNPTPAVTPQPRGAEFHMWNYHSHVFSVGDTFSLAMHLQYKIHEAPFDLLLEWLYVPIDPTCQPMRLYSTCLYHPNAPQCLSHMNSGCTFTSPHLAQRVASTVYQNCEHADNYTAYCLGISHMEPSFGLILHDGGTTLKFVDTPESLSGLYVFVVYFNGHVEAVAYTVVSTVDHFVNAIEERGFPPTAGQPPATTKPKEITPVNPGTSPLLRYAAWTGGLAAVVLLCLVIFLICTAKRMRVKAYRVDKSPYNQSMYYAGLPVDDFEDSESTDTEEEFGNAIGGSHGGSSYTVYIDKTR

SEQ ID NO: 300 - protein, 561 aa, synthetic construct
  REGION 1..561: note = Synthetic Polypeptide
MGTVNKPVVGVLMGFGIITGTLRITNPVRASVLRYDDFHIDEDKLDTNSVYEPYYHSDHAESSWVNRGESSRKAYDHNSPYIWPRNDYDGFLENAHEHHGVYNQGRGIDSGERLMQPTQMSAQEDLGDDTGIHVIPTLNGDDRHKIVNVDQRQYGDVFKGDLNPKPQGQRLIEVSVEENHPFTLRAPIQRIYGVRYTETWSFLPSLTCTGDAAPAIQHICLKHTTCFQDVVVDVDCAENTKEDQLAEISYRFQGKKEADQPWIVVNTSTLFDELELDPPEIEPGVLKVLRTEKQYLGVYIWNMRGSDGTSTYATFLVTWKGDEKTRNPTPAVTPQPRGAEFHMWNYHSHVFSVGDTFSLAMHLQYKIHEAPFDLLLEWLYVPIDPTCQPMRLYSTCLYHPNAPQCLSHMNSGCTFTSPHLAQRVASTVYQNCEHADNYTAYCLGISHMEPSFGLILHDGGTTLKFVDTPESLSGLYVFVVYFNGHVEAVAYTVVSTVDHFVNAIEERGFPPTAGQPPATTKPKEITPVNPGTSPLLRYAAWTGGLAAVVLLCLVIFLICTA

SEQ ID NO: 301 - protein, 551 aa, synthetic construct
  REGION 1..551: note = Synthetic Polypeptide
METPAQLLFLLLLWLPDTTGSVLRYDDFHIDEDKLDTNSVYEPYYHSDHAESSWVNRGESSRKAYDHNSPYIWPRNDYDGFLENAHEHHGVYNQGRGIDSGERLMQPTQMSAQEDLGDDTGIHVIPTLNGDDRHKIVNVDQRQYGDVFKGDLNPKPQGQRLIEVSVEENHPFTLRAPIQRIYGVRYTETWSFLPSLTCTGDAAPAIQHICLKHTTCFQDVVVDVDCAENTKEDQLAEISYRFQGKKEADQPWIVVNTSTLFDELELDPPEIEPGVLKVLRTEKQYLGVYIWNMRGSDGTSTYATFLVTWKGDEKTRNPTPAVTPQPRGAEFHMWNYHSHVFSVGDTFSLAMHLQYKIHEAPFDLLLEWLYVPIDPTCQPMRLYSTCLYHPNAPQCLSHMNSGCTFTSPHLAQRVASTVYQNCEHADNYTAYCLGISHMEPSFGLILHDGGTTLKFVDTPESLSGLYVFVVYFNGHVEAVAYTVVSTVDHFVNAIEERGFPPTAGQPPATTKPKEITPVNPGTSPLLRYAAWTGGLAAVVLLCLVIFLICTA

SEQ ID NO: 302 - protein, 623 aa, synthetic construct
  REGION 1..623: note = Synthetic Polypeptide
MGTVNKPVVGVLMGFGIITGTLRITNPVRASVLRYDDFHIDEDKLDTNSVYEPYYHSDHAESSWVNRGESSRKAYDHNSPYIWPRNDYDGFLENAHEHHGVYNQGRGIDSGERLMQPTQMSAQEDLGDDTGIHVIPTLNGDDRHKIVNVDQRQYGDVFKGDLNPKPQGQRLIEVSVEENHPFTLRAPIQRIYGVRYTETWSFLPSLTCTGDAAPAIQHICLKHTTCFQDVVVDVDCAENTKEDQLAEISYRFQGKKEADQPWIVVNTSTLFDELELDPPEIEPGVLKVLRTEKQYLGVYIWNMRGSDGTSTYATFLVTWKGDEKTRNPTPAVTPQPRGAEFHMWNYHSHVFSVGDTFSLAMHLQYKIHEAPFDLLLEWLYVPIDPTCQPMRLYSTCLYHPNAPQCLSHMNSGCTFTSPHLAQRVASTVYQNCEHADNYTAYCLGISHMEPSFGLILHDGGTTLKFVDTPESLSGLYVFVVYFNGHVEAVAYTVVSTVDHFVNAIEERGFPPTAGQPPATTKPKEITPVNPGTSPLLRYAAWTGGLAAVVLLCLVIFLICTAKRMRVKAYRVDKSPYNQSMYYAGLPVDDFEDAEAADAEEEFGNAIGGSHGGSSYTVYIDKTR

SEQ ID NO: 303 - protein, 623 aa, synthetic construct
  REGION 1..623: note = Synthetic Polypeptide
MGTVNKPVVGVLMGFGIITGTLRITNPVRASVLRYDDFHIDEDKLDTNSVYEPYYHSDHAESSWVNRGESSRKAYDHNSPYIWPRNDYDGFLENAHEHHGVYNQGRGIDSGERLMQPTQMSAQEDLGDDTGIHVIPTLNGDDRHKIVNVDQRQYGDVFKGDLNPKPQGQRLIEVSVEENHPFTLRAPIQRIYGVRYTETWSFLPSLTCTGDAAPAIQHICLKHTTCFQDVVVDVDCAENTKEDQLAEISYRFQGKKEADQPWIVVNTSTLFDELELDPPEIEPGVLKVLRTEKQYLGVYIWNMRGSDGTSTYATFLVTWKGDEKTRNPTPAVTPQPRGAEFHMWNYHSHVFSVGDTFSLAMHLQYKIHEAPFDLLLEWLYVPIDPTCQPMRLYSTCLYHPNAPQCLSHMNSGCTFTSPHLAQRVASTVYQNCEHADNYTAYCLGISHMEPSFGLILHDGGTTLKFVDTPESLSGLYVFVVYFNGHVEAVAYTVVSTVDHFVNAIEERGFPPTAGQPPATTKPKEITPVNPGTSPLLRYAAWTGGLAAVVLLCLVIFLICTAKRMRVKAYRVDKSPYNQSMYGAGLPVDDFEDAEAADAEEEFGNAIGGSHGGSSYTVYIDKTR

SEQ ID NO: 304 - protein, 573 aa, synthetic construct
  REGION 1..573: note = Synthetic Polypeptide
MGTVNKPVVGVLMGFGIITGTLRITNPVRASVLRYDDFHIDEDKLDTNSVYEPYYHSDHAESSWVNRGESSRKAYDHNSPYIWPRNDYDGFLENAHEHHGVYNQGRGIDSGERLMQPTQMSAQEDLGDDTGIHVIPTLNGDDRHKIVNVDQRQYGDVFKGDLNPKPQGQRLIEVSVEENHPFTLRAPIQRIYGVRYTETWSFLPSLTCTGDAAPAIQHICLKHTTCFQDVVVDVDCAENTKEDQLAEISYRFQGKKEADQPWIVVNTSTLFDELELDPPEIEPGVLKVLRTEKQYLGVYIWNMRGSDGTSTYATFLVTWKGDEKTRNPTPAVTPQPRGAEFHMWNYHSHVFSVGDTFSLAMHLQYKIHEAPFDLLLEWLYVPIDPTCQPMRLYSTCLYHPNAPQCLSHMNSGCTFTSPHLAQRVASTVYQNCEHADNYTAYCLGISHMEPSFGLILHDGGTTLKFVDTPESLSGLYVFVVYFNGHVEAVAYTVVSTVDHFVNAIEERGFPPTAGQPPATTKPKEITPVNPGTSPLLRYAAWTGGLAAVVLLCLVIFLICTAKRMRVKAYRVDK

SEQ ID NO: 305 - protein, 573 aa, synthetic construct
  REGION 1..573: note = Synthetic Polypeptide
MGTVNKPVVGVLMGFGIITGTLRITNPVRASVLRYDDFHIDEDKLDTNSVYEPYYHSDHAESSWVNRGESSRKAYDHNSPYIWPRNDYDGFLENAHEHHGVYNQGRGIDSGERLMQPTQMSAQEDLGDDTGIHVIPTLNGDDRHKIVNVDQRQYGDVFKGDLNPKPQGQRLIEVSVEENHPFTLRAPIQRIYGVRYTETWSFLPSLTCTGDAAPAIQHICLKHTTCFQDVVVDVDCAENTKEDQLAEISYRFQGKKEADQPWIVVNTSTLFDELELDPPEIEPGVLKVLRTEKQYLGVYIWNMRGSDGTSTYATFLVTWKGDEKTRNPTPAVTPQPRGAEFHMWNYHSHVFSVGDTFSLAMHLQYKIHEAPFDLLLEWLYVPIDPTCQPMRLYSTCLYHPNAPQCLSHMNSGCTFTSPHLAQRVASTVYQNCEHADNYTAYCLGISHMEPSFGLILHDGGTTLKFVDTPESLSGLYVFVVYFNGHVEAVAYTVVSTVDHFVNAIEERGFPPTAGQPPATTKPKEITPVNPGTSPLLRYAAWTGGLAAVVLLCLVIFLICTAKRMRVKAARVDK

SEQ ID NO: 306 - DNA, 2050 bp, synthetic construct
  misc_feature 1..2050: note = Synthetic Polynucleotide
  source 1..2050: mol_type = other DNA
tcaagcttttggaccctcgtacagaagctaatacgactcactatagggaaataagagagaaaagaagagtaagaagaaatataagagccaccatggagactcccgctcagctactgttcctcctgctcctttggctgcctgatactacaggctctgttttgcggtacgacgactttcacatcgatgaggacaagctcgacactaatagcgtgtatgagccctactaccattcagatcacgccgagtcctcttgggtgaacaggggtgaaagttctaggaaagcctatgatcacaacagcccttatatttggccacggaatgattacgacggatttctcgaaaatgcccacgagcatcacggagtgtacaaccagggccgtggaatcgactctggggagagattgatgcaacctacacagatgagcgcccaggaagatctcggggatgatacaggaattcacgttatccctacattaaacggagatgaccgccacaaaatcgtcaatgtcgatcaaagacagtatggagatgtgttcaaaggcgatctcaaccctaagccgcagggccagagactcattgaggtgtctgtcgaagagaaccaccctttcactctgcgcgctcccattcagagaatctatggagttcgctatacggagacttggtcattccttccttccctgacatgcaccggagacgccgcccctgccattcagcacatatgcctgaaacataccacctgtttccaggatgtggtggttgatgttgattgtgctgaaaataccaaggaagaccaactggccgagattagttaccggttccaagggaaaaaggaagccgaccagccatggattgtggttaatacaagcactctgttcgatgagctcgagctggatccccccgagatagaacccggagttctgaaagtgctccggacagaaaaacaatatctgggagtctacatatggaacatgcgcggttccgatgggacctccacttatgcaacctttctcgtcacgtggaagggagatgagaaaactaggaatcccacacccgctgtcacaccacagccaagaggggctgagttccatatgtggaactatcatagtcacgtgtttagtgtcggagatacgttttcattggctatgcatctccagtacaagattcatgaggctcccttcgatctgttgcttgagtggttgtacgtcccgattgacccgacctgccagcccatgcgactgtacagcacctgtctctaccatccaaacgctccgcaatgtctgagccacatgaactctgggtgtactttcaccagtccccacctcgcccagcgggtggcctctactgtttaccagaactgtgagcacgccgacaactacaccgcatactgcctcggtatttctcacatggaaccctccttcggactcatcctgcacgatgggggcactaccctgaagttcgttgatacgccagaatctctgtctgggctctatgttttcgtggtctacttcaatggccatgtcgaggccgtggcctatactgtcgtttctaccgtggatcattttgtgaacgccatcgaagaacggggattcccccctacggcaggccagccgcctgcaaccaccaagcccaaggaaataacaccagtgaaccctggcacctcacctctcctaagatatgccgcgtggacagggggactggcggcagtggtgctcctctgtctcgtgatctttctgatctgtacagccaagaggatgagggtcaaggcttatagagtggacaagtccccctacaatcagtcaatgtactacgccggccttcccgttgatgattttgaggattccgagtccacagatactgaggaagagttcggtaacgctataggcggctctcacgggggttcaagctacacggtttacattgacaagacacgctgataataggctggagcctcggtggccatgcttcttgccccttgggcctccccccagcccctcctccccttcctgcacccgtacccccgtggtctttgaataaagtctgagtgggcggc

SEQ ID NO: 307 - protein, 354 aa, synthetic construct
  REGION 1..354: note = Synthetic Polypeptide
MFLIQCLISAVIFYIQVTNALIFKGDHVSLQVNSSLTSILIPMQNDNYTEIKGQLVFIGEQLPTGTNYSGTLELLYADTVAFCFRSVQVIRYDGCPRIRTSAFISCRYKHSWHYGNSTDRISTEPDAGVMLKITKPGINDAGVYVLLVRLDHSRSTDGFILGVNVYTAGSHHNIHGVIYTSPSLQNGYSTRALFQQARLCDLPATPKGSGTSLFQHMLDLRAGKSLEDNPWLHEDVVTTETKSVVKEGIENHVYPTDMSTLPEKSLNDPPENLLIIIPIVASVMILTAMVIVIVISVKRRRIKKHPIYRPNTKTRRGIQNATPESDVMLEAAIAQLATIREESPPHSVVNPFVK

SEQ ID NO: 308 - protein, 623 aa, Homo sapiens; identical to SEQ ID NO: 298

SEQ ID NO: 309 - protein, 354 aa, Homo sapiens; identical to SEQ ID NO: 307

SEQ ID NO: 310 - protein, 556 aa, synthetic construct
  REGION 1..556: note = Synthetic Polypeptide
MGTVNKPVVGVLMGFGIITGTLRITNPVRASVLRYDDFHIDEDKLDTNSVYEPYYHSDHAESSWVNRGESSRKAYDHNSPYIWPRNDYDGFLENAHEHHGVYNQGRGIDSGERLMQPTQMSAQEDLGDDTGVIPTLNGDDRHKIVNVDQRQYGDVFKGDLNPKPQGQRLIEVSVEENHPFTLRAPIQRIYGVRYTETWSFLPSLTCTGDAAPAIQHICLKHTTCFQDVVVDVDCAENTKEDQLAEISYRFQGKKEADQPWIVVNTTLFDELELDPPEIEPGVLKVLRTEKQYLGVYIWNMRGSDGTSTYATFLVTWKGDEKTRNPTPAVTPQPRGAEFHMWNYHSHVFSVGDTFSLAMHLQYKIHEAPFDLLLEWLYVPIDPTCQPMRLYSTCLYHPNAQCLSHMNSGCTFTSPHLAQRVASTVYQNCEHADNYTAYCLGISHMEPSFGLILHDGGTTLKFVDTPESLSGLYVFVVYFNGHVEAVAYTVVSTVDHFVNAIEERGFPPTAGQPPATTKPKEITPVNPGTSPLLRYAWTGGLAAVVLLCLVIFLICTA

SEQ ID NO: 311 - protein, 574 aa, Homo sapiens
MKRIQINLILTIACIQLSTESQPTPVSITELYTSAATRKPDPAVAPTSAATRKPDPAVAPTSAATRKPDPAVAPTSAATRKPDPAVAPTSAATRKPDPAVAPTSAATRKPDPAVAPTSAASRKPDPAVAPTSAASRKPDPAVAPTSAASRKPDPAANTQHSQPPFLYENIQCVHGGIQSIPYFHTFIMPCYMRLTTGQQAAFKQQQKTYEQYSLDPEGSNITRWKSLIRPDLHIEVWFTRHLIDPHRQLGNALIRMPDLPVMLYSNSADLNLINNPEIFTHAKENYVIPDVKTTSDFSVTILSMDATTEGTYIWRVVNTKTKNVISEHSITVTTYYRPNITVVGDPVLTGQTYAAYCNVSKYYPPHSVRVRWTSRFGNIGKNFITDAIQEYANGLFSYVSAVRIPQQKQMDYPPPAIQCNVLWIRDGVSNMKYSAVVTPDVYPFPNVSIGIIDGHIVCTAKCVPRGVVHFVWWVNDSPINHENSEITGVCDQNKRFVNMQSSCPTSELDGPITYSCHLDGYPKKFPPFSAVYTYDASTYATTFSVVAVIIGVISILGTLGLIAVIATLCIRCCS

SEQ ID NO: 312 - protein, 159 aa, Homo sapiens
MASHKWLLQIVFLKTITIAYCLHLQDDTPLFFGAKPLSDVSLIITEPCVSSVYEAWDYAAPPVSNLSEALSGIVVKTKCPVPEVILWFKDKQMAYWTNPYVTLKGLAQSVGEEHKSGDIRDALLDALSGVWVDSTPSSTNIPENGCVWGADRLFQRVCQ

SEQ ID NO: 313 - protein, 435 aa, Homo sapiens
MGTQKKGPRSEKVSPYDTTTPEVEALDHQMDTLNWRIWIIQVMMFTLGAVMLLATLIAASSEYTGIPCFYAAVVDYELFNATLDGGVWSGNRGGYSAPVLFLEPHSVVAFTYYTALTAMAMAVYTLITAAIIHRETKNQRVRQSSGVAWLVVDPTTLFWGLLSLWLLNAVVLLLAYKQIGVAATLYLGHFATSVIFTTYFCGRGKLDETNIKAVANLRQQSVFLYRLAGPTRAVFVNLMAALMAICILFVSLMLELVVANHLHTGLWSSVSVAMSTFSTLSVVYLIVSELILAHYIHVLIGPSLGTLVACATLGTAAHSYMDRLYDPISVQSPRLIPTTRGTLACLAVFSVVMLLLRLMRAYVYHRQKRSRFYGAVRRVPERVRGYIRKVKPAHRNSRRTNYPSQGYGYVYENDSTYETDREDELLYERSNSGWE

SEQ ID NO: 314 - protein, 841 aa, Homo sapiens
MFALVLAVVILPLWTTANKSYVTPTPATRSIGHMSALLREYSDRNMSLKLEAFYPTGFDEELIKSLHWGNDRKHVFLVIVKVNPTTHEGDVGLVIFPKYLLSPYHFKAEHRAPFPAGRFGFLSHPVTPDVSFFDSSFAPYLTTQHLVAFTTFPPNPLVWHLERAETAATAERPFGVSLLPARPTVPKNTILEHKAHFATWDALARHTFFSAEAIITNSTLRIHVPLFGSVWPIRYWATGSVLLTSDSGRVEVNIGVGFMSSLISLSSGPPIELIVVPHTVKLNAVTSDTTWFQLNPPGPDPGPSYRVYLLGRGLDMNFSKHATVDICAYPEESLDYRYHLSMAHTEALRMTTKADQHDINEESYYHIAARIATSIFALSEMGRTTEYFLLDEIVDVQYQLKFLNYILMRIGAGAHPNTISGTSDLIFADPSQLHDELSLLFGQVKPANVDYFISYDEARDQLKTAYALSRGQDHVNALSLARRVIMSIYKGLLVKQNLNATERQALFFASMILLNFREGLENSSRVLDGRTTLLLMTSMCTAAHATQAALNIQEGLAYLNPSKHMFTIPNVYSPCMGSLRTDLTEEIHVMNLLSAIPTRPGLNEVLHTQLDESEIFDAAFKTMMIFTTWTAKDLHILHTHVPEVFTCQDAAARNGEYVLILPAVQGHSYVITRNKPQRGLVYSLADVDVYNPISVVYLSRDTCVSEHGVIETVALPHPDNLKECLYCGSVFLRYLTTGAIMDIIIIDSKDTERQLAAMGNSTIPPFNPDMHGDDSKAVLLFPNGTVVTLLGFERRQAIRMSGQYLGASLGGAFLAVVGFGIIGWMLCGNSRLREYNKIPLT

SEQ ID NO: 315 - protein, 661 aa, Homo sapiens
MFYEALKAELVYTRAVHGFRPRANCVVLSDYIPRVACNMGTVNKPVVGVLMGFGIITGTLRITNPVRASVLRYDDFHIDEDKLDTNSVYEPYYHSDHAESSWVNRGESSRKAYDHNSPYIWPRNDYDGFLENAHEHHGVYNQGRGIDSGERLMQPTQMSAQEDLGDDTGIHVIPTLNGDDRHKIVNVDQRQYGDVFKGDLNPKPQGQRLIEVSVEENHPFTLRAPIQRIYGVRYTETWSFLPSLTCTGDAAPAIQHICLKHTTCFQDVVVDVDCAENTKEDQLAEISYRFQGKKEADQPWIVVNTSTLFDELELDPPEIEPGVLKVLRTEKQYLGVYIWNMRGSDGTSTYATFLVTWKGDEKTRNPTPAVTPQPRGAEFHMWNYHSHVFSVGDTFSLAMHLQYKIHEAPFDLLLEWLYVPIDPTCQPMRLYSTCLYHPNAPQCLSHMNSGCTFTSPHLAQRVASTVYQNCEHADNYTAYCLGISHMEPSFGLILHDGGTTLKFVDTPESLSGLYVFVVYFNGHVEAVAYTVVSTVDHFVNAIEERGFPPTAGQPPATTKPKEITPVNPGTSPLLRYAAWTGGLAAVVLLCLVIFLICTAKRMRVKAYRVDKSPYNQSMYYAGLPVDDFEDSESTDTEEEFGNAIGGSHGGSSYTVYIDKTR

SEQ ID NO: 316 - protein, 868 aa, Homo sapiens
MFVTAVVSVSPSSFYESLQVEPTQSEDITRSAHLGDGDEIREAIHKSQDAETKPTFYVCPPPTGSTIVRLEPTRTCPDYHLGKNFTEGIAVVYKENIAAYKFKATVYYKDVIVSTAWAGSSYTQITNRYADRVPIPVSEITDTIDKFGKCSSKATYVRNNHKVEAFNEDKNPQDMPLIASKYNSVGSKAWHTTNDTYMVAGTPGTYRTGTSVNCIIEEVEARSIFPYDSFGLSTGDIIYMSPFFGLRDGAYREHSNYAMDRFHQFEGYRQRDLDTRALLEPAARNFLVTPHLTVGWNWKPKRTEVCSLVKWREVEDVVRDEYAHNFRFTMKTLSTTFISETNEFNLNQIHLSQCVKEEARAIINRIYTTRYNSSHVRTGDIQTYLARGGFVVVFQPLLSNSLARLYLQELVRENTNHSPQKHPTRNTRSRRSVPVELRANRTITTTSSVEFAMLQFTYDHIQEHVNEMLARISSSWCQLQNRERALWSGLFPINPSALASTILDQRVKARILGDVISVSNCPELGSDTRIILQNSMRVSGSTTRCYSRPLISIVSLNGSGTVEGQLGTDNELIMSRDLLEPCVANHKRYFLFGHHYVYYEDYRYVREIAVHDVGMISTYVDLNLTLLKDREFMPLQVYTRDELRDTGLLDYSEIQRRNQMHSLRFYDIDKVVQYDSGTAIMQGMAQFFQGLGTAGQAVGHVVLGATGALLSTVHGFTTFLSNPFGALAVGLLVLAGLVAAFFAYRYVLKLKTSPMKALYPLTTKGLKQLPEGMDPFAEKPNATDTPIEEIGDSQNTEPSVNSGFDPDKFREAQEMIKYMTLVSAAERQESKARKKNKTSALLTSRLTGLALRNRRGYSRVRTENVTGV

SEQ ID NO: 317 - protein, 340 aa, Homo sapiens
MQALGIKTEHFIIMCLLSGHAVFTLWYTARVKFEHECVYATTVINGGPVVWGSYNNSLIYVTFVNHSTFLDGLSGYDYSCRENLLSGDTMVKTAISTPLHDKIRIVLGTRNCHAYFWCVQLKMIFFAWFVYGMYLQFRRIRRMFGPFRSSCELISPTSYSLNYVTRVISNILLGYPYTKLARLLCDVSMRRDGMSKVFNADPISFLYMHKGVTLLMLLEVIAHISSGCIVLLTLGVAYTPCALLYPTYIRILAWVVVCTLAIVELISYVRPKPTKDNHLNHINTGGIRGICTTCCATVMSGLAIKCFYIVIFAIAVVIFMHYEQRVQVSLFGESENSQKH

SEQ ID NO: 318 - protein, 87 aa, Homo sapiens
MGSITASFILITMQILFFCEDSSGEPNFAERNFWHASCSARGVYIDGSMITTLFFYASLLGVCVALISLAYHACFRLFTRSVLRSTW

SEQ ID NO: 319 - protein, 6 aa, synthetic construct
  REGION 1..6: note = Synthetic Polypeptide
AEAADA

SEQ ID NO: 320 - protein, 4 aa, synthetic construct
  REGION 1..4: note = Synthetic Polypeptide
SSTT

SEQ ID NO: 321 - protein, 1271 aa, synthetic construct
  REGION 1..1271: note = Description of sequence: SARS-COV-2 B.1.617.2  SPIKE (Delta Variant (With two proline substitutions); Protein Sequence
MFVFLVLLPLVSSQCVNLRTRTQLPPAYTNSFTRGVYYPDKVFRSSVLHSTQDLFLPFFSNVTWFHAIHVSGTNGTKRFDNPVLPFNDGVYFASTEKSNIIRGWIFGTTLDSKTQSLLIVNNATNVVIKVCEFQFCNDPFLDVYYHKNNKSWMESGVYSSANNCTFEYVSQPFLMDLEGKQGNFKNLREFVFKNIDGYFKIYSKHTPINLVRDLPQGFSALEPLVDLPIGINITRFQTLLALHRSYLTPGDSSSGWTAGAAAYYVGYLQPRTFLLKYNENGTITDAVDCALDPLSETKCTLKSFTVEKGIYQTSNFRVQPTESIVRFPNITNLCPFGEVFNATRFASVYAWNRKRISNCVADYSVLYNSASFSTFKCYGVSPTKLNDLCFTNVYADSFVIRGDEVRQIAPGQTGKIADYNYKLPDDFTGCVIAWNSNNLDSKVGGNYNYRYRLFRKSNLKPFERDISTEIYQAGSKPCNGVEGFNCYFPLQSYGFQPTNGVGYQPYRVVVLSFELLHAPATVCGPKKSTNLVKNKCVNFNFNGLTGTGVLTESNKKFLPFQQFGRDIADTTDAVRDPQTLEILDITPCSFGGVSVITPGTNTSNQVAVLYQGVNCTEVPVAIHADQLTPTWRVYSTGSNVFQTRAGCLIGAEHVNNSYECDIPIGAGICASYQTQTNSRRRARSVASQSIIAYTMSLGAENSVAYSNNSIAIPTNFTISVTTEILPVSMTKTSVDCTMYICGDSTECSNLLLQYGSFCTQLNRALTGIAVEQDKNTQEVFAQVKQIYKTPPIKDFGGFNFSQILPDPSKPSKRSFIEDLLFNKVTLADAGFIKQYGDCLGDIAARDLICAQKFNGLTVLPPLLTDEMIAQYTSALLAGTITSGWTFGAGAALQIPFAMQMAYRFNGIGVTQNVLYENQKLIANQFNSAIGKIQDSLSSTASALGKLQNVVNQNAQALNTLVKQLSSNFGAISSVLNDILSRLDPPEAEVQIDRLITGRLQSLQTYVTQQLIRAAEIRASANLAATKMSECVLGQSKRVDFCGKGYHLMSFPQSAPHGVVFLHVTYVPAQEKNFTTAPAICHDGKAHFPREGVFVSNGTHWFVTQRNFYEPQIITTDNTFVSGNCDVVIGIVNNTVYDPLQPELDSFKEELDKYFKNHTSPDVDLGDISGINASVVNIQKEIDRLNEVAKNLNESLIDLQELGKYEQYIKWPWYIWLGFIAGLIAIVMVTIMLCCMTSCCSCLKGCCSCGSCCKFDEDDSEPVLKGVKLHYT

SEQ ID NO: 322 - DNA, 3813 bp, synthetic construct
  misc_feature 1..3813: note = Description of sequence: SARS-COV-2 B.1.617.2  SPIKE (Delta Variant (With two proline substitutions); DNA Sequence
  source 1..3813: mol_type = other DNA
atgttcgtgttcctggtgctgctgcccctggtgagcagccagtgcgtgaacctgcggacccggacccagctgccaccagcctacaccaacagcttcacccggggcgtctactaccccgacaaggtgttccggagcagcgtcctgcacagcacccaggacctgttcctgcccttcttcagcaacgtgacctggttccacgccatccacgtgagcggcaccaacggcaccaagcggttcgacaaccccgtgctgcccttcaacgacggcgtgtacttcgccagcaccgagaagagcaacatcatccggggctggatcttcggcaccaccctggacagcaagacccagagcctgctgatcgtgaataacgccaccaacgtggtgatcaaggtgtgcgagttccagttctgcaacgaccccttcctggacgtgtactaccacaagaacaacaagagctggatggagagcggcgtgtacagcagcgccaacaactgcaccttcgagtacgtgagccagcccttcctgatggacctggagggcaagcagggcaacttcaagaacctgcgggagttcgtgttcaagaacatcgacggctacttcaagatctacagcaagcacaccccaatcaacctggtgcgggatctgccccagggcttctcagccctggagcccctggtggacctgcccatcggcatcaacatcacccggttccagaccctgctggccctgcaccggagctacctgaccccaggcgacagcagcagcgggtggacagcaggcgcggctgcttactacgtgggctacctgcagccccggaccttcctgctgaagtacaacgagaacggcaccatcaccgacgccgtggactgcgccctggaccctctgagcgagaccaagtgcaccctgaagagcttcaccgtggagaagggcatctaccagaccagcaacttccgggtgcagcccaccgagagcatcgtgcggttccccaacatcaccaacctgtgccccttcggcgaggtgttcaacgccacccggttcgccagcgtgtacgcctggaaccggaagcggatcagcaactgcgtggccgactacagcgtgctgtacaacagcgccagcttcagcaccttcaagtgctacggcgtgagccccaccaagctgaacgacctgtgcttcaccaacgtgtacgccgacagcttcgtgatccgtggcgacgaggtgcggcagatcgcacccggccagacaggcaagatcgccgactacaactacaagctgcccgacgacttcaccggctgcgtgatcgcctggaacagcaacaacctcgacagcaaggtgggcggcaactacaactaccggtaccggctgttccggaagagcaacctgaagcccttcgagcgggacatcagcaccgagatctaccaagccggctccaagccttgcaacggcgtggagggcttcaactgctacttccctctgcagagctacggcttccagcccaccaacggcgtgggctaccagccctaccgggtggtggtgctgagcttcgagctgctgcacgccccagccaccgtgtgtggccccaagaagagcaccaacctggtgaagaacaagtgcgtgaacttcaacttcaacggccttaccggcaccggcgtgctgaccgagagcaacaagaaattcctgccctttcagcagttcggccgggacatcgccgacaccaccgacgctgtgcgggatccccagaccctggagatcctggacatcaccccttgcagcttcggcggcgtgagcgtgatcaccccaggcaccaacaccagcaaccaggtggccgtgctgtaccagggcgtgaactgcaccgaggtgcccgtggccatccacgccgaccagctgacacccacctggcgggtctacagcaccggcagcaacgtgttccagacccgggccggttgcctgatcggcgccgagcacgtgaacaacagctacgagtgcgacatccccatcggcgccggcatctgtgccagctaccagacccagaccaattcacggcggagggcaaggagcgtggccagccagagcatcatcgcctacaccatgagcctgggcgccgagaacagcgtggcctacagcaacaacagcatcgccatccccaccaacttcaccatcagcgtgaccaccgagattctgcccgtgagcatgaccaagaccagcgtggactgcaccatgtacatctgcggcgacagcaccgagtgcagcaacctgctgctgcagtacggcagcttctgcacccagctgaaccgggccctgaccggcatcgccgtggagcaggacaagaacacccaggaggtgttcgcccaggtgaagcagatctacaagacccctcccatcaaggacttcggcggcttcaacttcagccagatcctgcccgaccccagcaagcccagcaagcggagcttcatcgaggacctgctgttcaacaaggtgaccctagccgacgccggcttcatcaagcagtacggcgactgcctcggcgacatagccgcccgggacctgatctgcgcccagaagttcaacggcctgaccgtgctgcctcccctgctgaccgacgagatgatcgcccagtacaccagcgccctgttagccggaaccatcaccagcggctggactttcggcgctggagccgctctgcagatccccttcgccatgcagatggcctaccggttcaacggcatcggcgtgacccagaacgtgctgtacgagaaccagaagctgatcgccaaccagttcaacagcgccatcggcaagatccaggacagcctgagcagcaccgctagcgccctgggcaagctgcagaacgtggtgaaccagaacgcccaggccctgaacaccctggtgaagcagctgagcagcaacttcggcgccatcagcagcgtgctgaacgacatcctgagccggctggaccctcccgaggccgaggtgcagatcgaccggctgatcactggccggctgcagagcctgcagacctacgtgacccagcagctgatccgggccgccgagattcgggccagcgccaacctggccgccaccaagatgagcgagtgcgtgctgggccagagcaagcgggtggacttctgcggcaagggctaccacctgatgagctttccccagagcgcaccccacggagtggtgttcctgcacgtgacctacgtgcccgcccaggagaagaacttcaccaccgccccagccatctgccacgacggcaaggcccactttccccgggagggcgtgttcgtgagcaacggcacccactggttcgtgacccagcggaacttctacgagccccagatcatcaccaccgacaacaccttcgtgagcggcaactgcgacgtggtgatcggcatcgtgaacaacaccgtgtacgatcccctgcagcccgagctggacagcttcaaggaggagctggacaagtacttcaagaatcacaccagccccgacgtggacctgggcgacatcagcggcatcaacgccagcgtggtgaacatccagaaggagatcgatcggctgaacgaggtggccaagaacctgaacgagagcctgatcgacctgcaggagctgggcaagtacgagcagtacatcaagtggccctggtacatctggctgggcttcatcgccggcctgatcgccatcgtgatggtgaccatcatgctgtgctgcatgaccagctgctgcagctgcctgaagggctgttgcagctgcggcagctgctgcaagttcgacgaggacgacagcgagcccgtgctgaagggcgtgaagctgcactacacc

SEQ ID NO: 323 - DNA, 56 bp, synthetic construct
  misc_feature 1..56: note = Description of sequence: 5' UTR; DNA sequence
  source 1..56: mol_type = other DNA
ggaaataagagagaaaagaagagtaagaagaaatataagaccccggcgccgccacc

SEQ ID NO: 324 - DNA, 220 bp, synthetic construct
  misc_feature 1..220: note = Description of sequence: 3' UTR and PolyA? DNA sequence
  source 1..220: mol_type = other DNA
gctggagcctcggtggcctagcttcttgccccttgggcctccccccagcccctcctccccttcctgcacccgtacccccgtggtctttgaataaagtctgagtgggcggcaaaaaaaaaaaaaaaaaaaaaaaaaaaaaagcatatgactaaaaaaaaaaaaaaaaaaaaaaaaaaaaaaaaaaaaaaaaaaaaaaaaaaaaaaaaaaaaaaaaaaaaaa

SEQ ID NO: 325 - protein, 1270 aa, synthetic construct
  REGION 1..1270: note = Description of sequence: SARS-COV-2 B.1.1.529  SPIKE (Omicron Variant (With two proline substitutions); Protein Sequence
MFVFLVLLPLVSSQCVNLTTRTQLPPAYTNSFTRGVYYPDKVFRSSVLHSTQDLFLPFFSNVTWFHVISGTNGTKRFDNPVLPFNDGVYFASIEKSNIIRGWIFGTTLDSKTQSLLIVNNATNVVIKVCEFQFCNDPFLDHKNNKSWMESEFRVYSSANNCTFEYVSQPFLMDLEGKQGNFKNLREFVFKNIDGYFKIYSKHTPIIVREPEDLPQGFSALEPLVDLPIGINITRFQTLLALHRSYLTPGDSSSGWTAGAAAYYVGYLQPRTFLLKYNENGTITDAVDCALDPLSETKCTLKSFTVEKGIYQTSNFRVQPTESIVRFPNITNLCPFDEVFNATRFASVYAWNRKRISNCVADYSVLYNIAPFSTFKCYGVSPTKLNDLCFTNVYADSFVIRGDEVRQIAPGQTGNIADYNYKLPDDFTGCVIAWNSNKLDSKVSGNYNYLYRLFRKSNLKPFERDISTEIYQAGNKPCNGVAGFNCYFPLRSYSFRPTYGVGYQPYRVVVLSFELLHAPATVCGPKKSTNLVKNKCVNFNFNGLKGTGVLTESNKKFLPFQQFGRDIADTTDAVRDPQTLEILDITPCSFGGVSVITPGTNTSNQVAVLYQGVNCTEVPVAIHADQLTPTWRVYSTGSNVFQTRAGCLIGAEYVNNSYECDIPIGAGICASYQTQTKSHRRARSVASQSIIAYTMSLGAENSVAYSNNSIAIPTNFTISVTTEILPVSMTKTSVDCTMYICGDSTECSNLLLQYGSFCTQLKRALTGIAVEQDKNTQEVFAQVKQIYKTPPIKYFGGFNFSQILPDPSKPSKRSFIEDLLFNKVTLADAGFIKQYGDCLGDIAARDLICAQKFKGLTVLPPLLTDEMIAQYTSALLAGTITSGWTFGAGAALQIPFAMQMAYRFNGIGVTQNVLYENQKLIANQFNSAIGKIQDSLSSTASALGKLQDVVNHNAQALNTLVKQLSSKFGAISSVLNDILSRLDPPEAEVQIDRLITGRLQSLQTYVTQQLIRAAEIRASANLAATKMSECVLGQSKRVDFCGKGYHLMSFPQSAPHGVVFLHVTYVPAQEKNFTTAPAICHDGKAHFPREGVFVSNGTHWFVTQRNFYEPQIITTDNTFVSGNCDVVIGIVNNTVYDPLQPELDSFKEELDKYFKNHTSPDVDLGDISGINASVVNIQKEIDRLNEVAKNLNESLIDLQELGKYEQYIKWPWYIWLGFIAGLIAIVMVTIMLCCMTSCCSCLKGCCSCGSCCKFDEDDSEPVLKGVKLHYT

SEQ ID NO: 326 - DNA, 3810 bp, synthetic construct
  misc_feature 1..3810: note = Description of sequence: SARS-COV-2 B.1.1.529  SPIKE (Omicron Variant (With two proline substitutions); DNA Sequence
  source 1..3810: mol_type = other DNA
atgttcgtgttcctggtgctgctgcccctggtgagcagccagtgcgtgaacctgaccacccggacccagctgccaccagcctacaccaacagcttcacccggggcgtctactaccccgacaaggtgttccggagcagcgtcctgcacagcacccaggacctgttcctgcccttcttcagcaacgtgacctggttccacgtcatcagcggcaccaacggcaccaagcggttcgacaaccccgtgctgcccttcaacgacggcgtgtacttcgccagcatcgagaagagcaacatcatccggggctggatcttcggcaccaccctggacagcaagacccagagcctgctgatcgtgaataacgccaccaacgtggtgatcaaggtgtgcgagttccagttctgcaacgaccccttcctggaccacaagaacaacaagagctggatggagagcgagttccgggtgtacagcagcgccaacaactgcaccttcgagtacgtgagccagcccttcctgatggacctggagggcaagcagggcaacttcaagaacctgcgggagttcgtgttcaagaacatcgacggctacttcaagatctacagcaagcacaccccaatcatcgtgcgggagccagaagatctgccccagggcttctcagccctggagcccctggtggacctgcccatcggcatcaacatcacccggttccagaccctgctggccctgcaccggagctacctgaccccaggcgacagcagcagcgggtggacagcaggcgcggctgcttactacgtgggctacctgcagccccggaccttcctgctgaagtacaacgagaacggcaccatcaccgacgccgtggactgcgccctggaccctctgagcgagaccaagtgcaccctgaagagcttcaccgtggagaagggcatctaccagaccagcaacttccgggtgcagcccaccgagagcatcgtgcggttccccaacatcaccaacctgtgccccttcgacgaggtgttcaacgccacccggttcgccagcgtgtacgcctggaaccggaagcggatcagcaactgcgtggccgactacagcgtgctgtacaacatcgcccccttcagcaccttcaagtgctacggcgtgagccccaccaagctgaacgacctgtgcttcaccaacgtgtacgccgacagcttcgtgatccgtggcgacgaggtgcggcagatcgcacccggccagacaggcaacatcgccgactacaactacaagctgcccgacgacttcaccggctgcgtgatcgcctggaacagcaacaagctcgacagcaaggtgagcggcaactacaactacctgtaccggctgttccggaagagcaacctgaagcccttcgagcgggacatcagcaccgagatctaccaagccggcaacaagccttgcaacggcgtggcgggcttcaactgctacttccctctgcggagctacagcttccggcccacctacggcgtgggctaccagccctaccgggtggtggtgctgagcttcgagctgctgcacgccccagccaccgtgtgtggccccaagaagagcaccaacctggtgaagaacaagtgcgtgaacttcaacttcaacggccttaagggcaccggcgtgctgaccgagagcaacaagaaattcctgccctttcagcagttcggccgggacatcgccgacaccaccgacgctgtgcgggatccccagaccctggagatcctggacatcaccccttgcagcttcggcggcgtgagcgtgatcaccccaggcaccaacaccagcaaccaggtggccgtgctgtaccagggcgtgaactgcaccgaggtgcccgtggccatccacgccgaccagctgacacccacctggcgggtctacagcaccggcagcaacgtgttccagacccgggccggttgcctgatcggcgccgagtacgtgaacaacagctacgagtgcgacatccccatcggcgccggcatctgtgccagctaccagacccagaccaagtcacaccggagggcaaggagcgtggccagccagagcatcatcgcctacaccatgagcctgggcgccgagaacagcgtggcctacagcaacaacagcatcgccatccccaccaacttcaccatcagcgtgaccaccgagattctgcccgtgagcatgaccaagaccagcgtggactgcaccatgtacatctgcggcgacagcaccgagtgcagcaacctgctgctgcagtacggcagcttctgcacccagctgaagcgggccctgaccggcatcgccgtggagcaggacaagaacacccaggaggtgttcgcccaggtgaagcagatctacaagacccctcccatcaagtacttcggcggcttcaacttcagccagatcctgcccgaccccagcaagcccagcaagcggagcttcatcgaggacctgctgttcaacaaggtgaccctagccgacgccggcttcatcaagcagtacggcgactgcctcggcgacatagccgcccgggacctgatctgcgcccagaagttcaagggcctgaccgtgctgcctcccctgctgaccgacgagatgatcgcccagtacaccagcgccctgttagccggaaccatcaccagcggctggactttcggcgctggagccgctctgcagatccccttcgccatgcagatggcctaccggttcaacggcatcggcgtgacccagaacgtgctgtacgagaaccagaagctgatcgccaaccagttcaacagcgccatcggcaagatccaggacagcctgagcagcaccgctagcgccctgggcaagctgcaggacgtggtgaaccacaacgcccaggccctgaacaccctggtgaagcagctgagcagcaagttcggcgccatcagcagcgtgctgaacgacatcctgagccggctggaccctcccgaggccgaggtgcagatcgaccggctgatcactggccggctgcagagcctgcagacctacgtgacccagcagctgatccgggccgccgagattcgggccagcgccaacctggccgccaccaagatgagcgagtgcgtgctgggccagagcaagcgggtggacttctgcggcaagggctaccacctgatgagctttccccagagcgcaccccacggagtggtgttcctgcacgtgacctacgtgcccgcccaggagaagaacttcaccaccgccccagccatctgccacgacggcaaggcccactttccccgggagggcgtgttcgtgagcaacggcacccactggttcgtgacccagcggaacttctacgagccccagatcatcaccaccgacaacaccttcgtgagcggcaactgcgacgtggtgatcggcatcgtgaacaacaccgtgtacgatcccctgcagcccgagctggacagcttcaaggaggagctggacaagtacttcaagaatcacaccagccccgacgtggacctgggcgacatcagcggcatcaacgccagcgtggtgaacatccagaaggagatcgatcggctgaacgaggtggccaagaacctgaacgagagcctgatcgacctgcaggagctgggcaagtacgagcagtacatcaagtggccctggtacatctggctgggcttcatcgccggcctgatcgccatcgtgatggtgaccatcatgctgtgctgcatgaccagctgctgcagctgcctgaagggctgttgcagctgcggcagctgctgcaagttcgacgaggacgacagcgagcccgtgctgaagggcgtgaagctgcactacacc

SEQ ID NO: 327 - protein, 1270 aa, synthetic construct
  REGION 1..1270: note = Description of sequence: SARS-COV-2 BA.2  SPIKE (Omicron BA.2 Variant (With two proline substitutions); Protein Sequence
MFVFLVLLPLVSSQCVNLITRTQSYTNSFTRGVYYPDKVFRSSVLHSTQDLFLPFFSNVTWFHAIHVSGTNGTKRFDNPVLPFNDGVYFASTEKSNIIRGWIFGTTLDSKTQSLLIVNNATNVVIKVCEFQFCNDPFLDVYYHKNNKSWMESEFRVYSSANNCTFEYVSQPFLMDLEGKQGNFKNLREFVFKNIDGYFKIYSKHTPINLGRDLPQGFSALEPLVDLPIGINITRFQTLLALHRSYLTPGDSSSGWTAGAAAYYVGYLQPRTFLLKYNENGTITDAVDCALDPLSETKCTLKSFTVEKGIYQTSNFRVQPTESIVRFPNITNLCPFDEVFNATRFASVYAWNRKRISNCVADYSVLYNFAPFFAFKCYGVSPTKLNDLCFTNVYADSFVIRGNEVSQIAPGQTGNIADYNYKLPDDFTGCVIAWNSNKLDSKVGGNYNYLYRLFRKSNLKPFERDISTEIYQAGNKPCNGVAGFNCYFPLRSYGFRPTYGVGHQPYRVVVLSFELLHAPATVCGPKKSTNLVKNKCVNFNFNGLTGTGVLTESNKKFLPFQQFGRDIADTTDAVRDPQTLEILDITPCSFGGVSVITPGTNTSNQVAVLYQGVNCTEVPVAIHADQLTPTWRVYSTGSNVFQTRAGCLIGAEYVNNSYECDIPIGAGICASYQTQTKSHRRARSVASQSIIAYTMSLGAENSVAYSNNSIAIPTNFTISVTTEILPVSMTKTSVDCTMYICGDSTECSNLLLQYGSFCTQLKRALTGIAVEQDKNTQEVFAQVKQIYKTPPIKYFGGFNFSQILPDPSKPSKRSFIEDLLFNKVTLADAGFIKQYGDCLGDIAARDLICAQKFNGLTVLPPLLTDEMIAQYTSALLAGTITSGWTFGAGAALQIPFAMQMAYRFNGIGVTQNVLYENQKLIANQFNSAIGKIQDSLSSTASALGKLQDVVNHNAQALNTLVKQLSSKFGAISSVLNDILSRLDPPEAEVQIDRLITGRLQSLQTYVTQQLIRAAEIRASANLAATKMSECVLGQSKRVDFCGKGYHLMSFPQSAPHGVVFLHVTYVPAQEKNFTTAPAICHDGKAHFPREGVFVSNGTHWFVTQRNFYEPQIITTDNTFVSGNCDVVIGIVNNTVYDPLQPELDSFKEELDKYFKNHTSPDVDLGDISGINASVVNIQKEIDRLNEVAKNLNESLIDLQELGKYEQYIKWPWYIWLGFIAGLIAIVMVTIMLCCMTSCCSCLKGCCSCGSCCKFDEDDSEPVLKGVKLHYT

SEQ ID NO: 328 - DNA, 3810 bp, synthetic construct
  misc_feature 1..3810: note = Description of sequence: SARS-COV-2 BA.2  SPIKE (Omicron BA.2 Variant (With two proline substitutions); DNA Sequence
  source 1..3810: mol_type = other DNA
atgttcgtgttcctggtgctgctgcccctggtgagcagccagtgcgtgaacctgatcacccggacccagagctacaccaacagcttcacccggggcgtctactaccccgacaaggtgttccggagcagcgtcctgcacagcacccaggacctgttcctgcccttcttcagcaacgtgacctggttccacgccatccacgtgagcggcaccaacggcaccaagcggttcgacaaccccgtgctgcccttcaacgacggcgtgtacttcgccagcaccgaaaagagcaacatcatccggggctggatcttcggcaccaccctggacagcaagacccagagcctgctgatcgtgaataacgccaccaacgtggtgatcaaggtgtgcgagttccagttctgcaacgaccccttcctggacgtgtactaccacaagaacaacaagagctggatggagagcgagttccgggtgtacagcagcgccaacaactgcaccttcgagtacgtgagccagcccttcctgatggacctggagggcaagcagggcaacttcaagaacctgcgggagttcgtgttcaagaacatcgacggctacttcaagatctacagcaagcacaccccaatcaacctgggccgggatctgccccagggcttctcagccctggagcccctggtggacctgcccatcggcatcaacatcacccggttccagaccctgctggccctgcaccggagctacctgaccccaggcgacagcagcagcgggtggacagcaggcgcggctgcttactacgtgggctacctgcagccccggaccttcctgctgaagtacaacgagaacggcaccatcaccgacgccgtggactgcgccctggaccctctgagcgagaccaagtgcaccctcaagagcttcaccgtggagaagggcatctaccagaccagcaacttccgggtgcagcccaccgagagcatcgtgcggttccccaacatcaccaacctgtgccccttcgacgaggtgttcaacgccacccggttcgccagcgtgtacgcctggaaccggaagcggatcagcaactgcgtggccgactacagcgtgctgtacaacttcgccccattcttcgccttcaagtgctacggcgtgagccccaccaagctgaacgacctgtgcttcaccaacgtgtacgccgacagcttcgtgatccgtggcaacgaggtgagccagatcgcacccggccagacaggcaacatcgccgactacaactacaagctgcccgacgacttcaccggctgcgtgatcgcctggaacagcaacaagctcgacagcaaggtgggcggcaactacaactacctgtaccggctgttccgaaagagcaacctgaagcccttcgagcgggacatcagcaccgagatctaccaagccggcaacaagccttgcaacggcgtggccggcttcaactgctacttccctctgcggagctacggcttccggcccacctacggcgtgggccaccagccctaccgggtggtggtgctgagcttcgagctgctgcacgccccagccaccgtgtgtggccccaagaagagtaccaacctggtgaagaacaagtgcgtgaacttcaacttcaacggccttaccggcaccggcgtgctgaccgagagcaacaagaaattcctgccctttcagcagttcggccgggacatcgccgacaccaccgacgctgtgcgggatccccagaccctggagatcctggacatcaccccttgcagcttcggcggcgtgagcgtgatcaccccaggcaccaacaccagcaaccaggtggccgtgctgtaccagggcgtgaactgcaccgaggtgcccgtggccatccacgccgaccagctgacacccacctggcgggtctacagcaccggcagcaacgtgttccagacccgggccggttgcctgatcggcgccgagtacgtgaacaacagctacgagtgcgacatccccatcggcgccggcatctgtgccagctaccagacccagaccaagtcacaccggagggcaaggagcgtggccagccagagcatcatcgcctacaccatgagcctgggcgccgagaacagcgtggcctacagcaacaacagcatcgccatccccaccaacttcaccatcagcgtgaccaccgagattctgcccgtgagcatgaccaagaccagcgtggactgcaccatgtacatctgcggcgacagcaccgagtgcagcaacctgctgctgcagtacggcagcttctgcacccagctgaagcgggccctgaccggcatcgccgtggagcaggacaagaacacccaggaggtgttcgcccaggtgaagcagatctacaagacccctcccatcaagtacttcggcggcttcaacttcagccagatcctgcccgaccccagcaagcccagcaagcggagcttcatcgaggacctgctgttcaacaaggtgaccctagccgacgccggcttcatcaagcagtacggcgactgcctcggcgacatagccgcccgggacctgatctgcgcccagaagttcaacggcctgaccgtgctgcctcccctgctgaccgacgagatgatcgcccagtacaccagcgccctgttagccggaaccatcaccagcggctggactttcggcgctggagccgctctgcagatccccttcgccatgcagatggcctaccggttcaacggcatcggcgtgacccagaacgtgctgtacgagaaccagaagctgatcgccaaccagttcaacagcgccatcggcaagatccaggacagcctgagcagcaccgctagcgccctgggcaagctgcaggacgtggtgaaccacaacgcccaggccctgaacaccctggtgaagcagctgagcagcaagttcggcgccatcagcagcgtgctgaacgacatcctgagccggctggaccctcccgaggccgaggtgcagatcgaccggctgatcactggccggctgcagagcctgcagacctacgtgacccagcagctgatccgggccgccgagattcgggccagcgccaacctggccgccaccaagatgagcgagtgcgtgctgggccagagcaagcgggtggacttctgcggcaagggctaccacctgatgagctttccccagagcgcaccccacggagtggtgttcctgcacgtgacctacgtgcccgcccaggagaagaacttcaccaccgccccagccatctgccacgacggcaaggcccactttccccgggagggcgtgttcgtgagcaacggcacccactggttcgtgacccagcggaacttctacgagccccagatcatcaccaccgacaacaccttcgtgagcggcaactgcgacgtggtgatcggcatcgtgaacaacaccgtgtacgatcccctgcagcccgagctggacagcttcaaggaggagctggacaagtacttcaagaatcacaccagccccgacgtggacctgggcgacatcagcggcatcaacgccagcgtggtgaacatccagaaggagatcgatcggctgaacgaggtggccaagaacctgaacgagagcctgatcgacctgcaggagctgggcaagtacgagcagtacatcaagtggccctggtacatctggctgggcttcatcgccggcctgatcgccatcgtgatggtgaccatcatgctgtgctgcatgaccagctgctgcagctgcctgaagggctgttgcagctgcggcagctgctgcaagttcgacgaggacgacagcgagcccgtgctgaagggcgtgaagctgcactacacc

SEQ ID NO: 329 - protein, 600 aa, synthetic construct
  REGION 1..600: note = Description of sequence: ARV-COV-MTE (SARS-COV-2 Multi-T-cell-Epitopes); Protein Sequence
MFLALITLATCELYHYQECVRGTTEELKKLLEQWNLVIGFLFLTWICLLQFAYANRNRFLYIIKLIFLWLLWPVTLACFVLAAVYRINWITGGMACLVGLMWLSYFIASFRLFARTRSMWSFNPETNILLNVPLHGTILTRPLLESELVIGAVILRGHLRIAGHHLGRCDIKDLPKEITVATSRTLSYYKLGASQRVAGDSGFAAYSRYRIGNYKLNTDHSSSSDNIALLVPNNTASWFTALTQHGKEDLKFPRGQGVPINTNSSPDDQIGYYRRATRRIRGGDGKMKDLSPRWYFYYLGTGPEAGLPYGGRRGPEQTQGNFGDQELIRQGTDYKHWPQIAQFAPSASAFFGMSRIGMEVTPSGTWLTYTGAIKLDDKDPNFKDQVILLNKHIDAYKTFPPTEPKKDKKRSKNPLLYDANYFLCWHTNCYDYCIPYNSVTSSIVITYALVYFLQSINFVRISGVKDCVVLHSYFTSDYYQLYSTQLSTDTGVEHVTFFIYNKIVDEPEEHVQLEQPYVFIKRSDARTAPHGSEKSYELQTPFEIKLVCTNYMPYFFTLLLQLMTYRRLISMMGFKMNYQVNREQIDGYVMHANYIFWRNT

SEQ ID NO: 330 - DNA, 1800 bp, synthetic construct
  misc_feature 1..1800: note = Description of sequence: ARV-COV-MTE (SARS-COV-2 Multi-T-cell-Epitopes); DNA Sequence
  source 1..1800: mol_type = other DNA
atgttcctggccctcatcaccctcgccacgtgcgagctgtaccactaccaggagtgcgtgcggggcaccaccgaggagctgaagaagctcctcgagcagtggaacctggtgatcggcttcctgttcctgacctggatctgcctgctgcagttcgcctatgccaaccggaaccggttcctgtacatcatcaagctgatcttcctgtggctcctgtggccggtcaccctggcctgcttcgtgctcgccgccgtgtaccggatcaactggatcaccggcgggatggcctgcctggtggggctgatgtggctgagctacttcatcgccagcttccggctgttcgcccggacgcggagcatgtggagctttaaccccgagaccaacatcctgctgaacgtccccctgcacggcacgatcctgacccggcccctgctggagagcgagctggtcatcggcgcggtgatcctgcggggccacctgcggatcgccggccaccacctgggccggtgcgacatcaaggacctgcccaaggagatcaccgtcgccaccagccggacgctgagctactacaagctgggcgccagccagcgggtcgccggcgacagcgggttcgccgcctacagccggtaccggatcggcaactacaagctgaacaccgaccacagcagcagcagcgacaacatcgccctgctggtgcccaacaacaccgcgtcctggttcaccgccctgacccagcacgggaaagaggacctgaagttcccgagggggcagggcgtgccgatcaatactaatagtagcccagacgaccagataggctactaccggcgggccaccaggcgaattcgcgggggagacgggaagatgaaggacctgagtccccggtggtacttctactacctgggcaccgggccagaggccggcctgccatacggcggccgccggggcccagagcagacgcagggcaacttcggcgaccaagagctgattcgccagggcacggactacaagcactggcctcagatagcccaattcgcccccagcgcgagcgcgtttttcgggatgagcagaatagggatggaggtgacccccagcggaacgtggctcacctacaccggcgcgatcaagttggatgacaaagacccaaacttcaaagaccaggtcatactgcttaacaaacatatcgatgcatacaaaacattcccgccgacggagcccaaaaaggacaagaagagaagcaaaaacccgctgctgtacgacgccaactacttcctgtgctggcacacgaactgctacgactactgcatcccctacaacagcgttaccagcagcatagtaatcacctatgccttggtgtacttcctgcaaagcatcaacttcgtgagaatcagcggcgtgaaggactgcgtagtgctccacagctacttcacatccgactactaccagctgtacagcacccagctgagcaccgacaccggcgtggagcacgtaaccttcttcatatacaacaaaatcgtcgacgaacccgaggagcacgtacagctggaacagccatacgtgttcataaaacgctcagacgcaaggaccgccccccacgggagcgagaagagttacgagctgcaaaccccattcgagatcaagctggtctgcaccaactacatgccgtacttcttcaccctcctgctgcagctcatgacgtaccgacgactgatcagcatgatggggttcaagatgaactaccaagtgaacagagagcagatcgacggctacgtcatgcacgccaactacatcttctggaggaacaca

SEQ ID NO: 331 - DNA, 53 bp, synthetic construct
  misc_feature 1..53: note = Description of sequence: 5' UTR DNA sequence of ARV-COV-MTE; DNA sequence
  source 1..53: mol_type = other DNA
agaataaactagtattcttctggtccccacagactcagagagaacccgccacc

SEQ ID NO: 332 - DNA, 405 bp, synthetic construct
  misc_feature 1..405: note = Description of sequence: 3' UTR and PolyA; DNA sequence of ARV-COV-MTE; DNA sequence
  source 1..405: mol_type = other DNA
ctcgagctggtactgcatgcacgcaatgctagctgcccctttcccgtcctgggtaccccgagtctcccccgacctcgggtcccaggtatgctcccacctccacctgccccactcaccacctctgctagttccagacacctcccaagcacgcagcaatgcagctcaaaacgcttagcctagccacacccccacgggaaacagcagtgattaacctttagcaataaacgaaagtttaactaagctatactaaccccagggttggtcaatttcgtgccagccacaccctggagctagcaaaaaaaaaaaaaaaaaaaaaaaaaaaaaagcatatgactaaaaaaaaaaaaaaaaaaaaaaaaaaaaaaaaaaaaaaaaaaaaaaaaaaaaaaaaaaaaaaaaaaaaaa

SEQ ID NO: 333 - protein, 416 aa, synthetic construct
  REGION 1..416: note = Description of sequence: SARS-COV-2 nucleocapsid phosphoprotein (Omicron B.1.1.529 Variant; Protein sequence
MSDNGPQNQRNALRITFGGPSDSTGSNQNGGARSKQRRPQGLPNNTASWFTALTQHGKEDLKFPRGQGVPINTNSSPDDQIGYYRRATRRIRGGDGKMKDLSPRWYFYYLGTGPEAGLPYGANKDGIIWVATEGALNTPKDHIGTRNPANNAAIVLQLPQGTTLPKGFYAEGSRGGSQASSRSSSRSRNSSRNSTPGSSKRTSPARMAGNGGDAALALLLLDRLNQLESKMSGKGQQQQGQTVTKKSAAEASKKPRQKRTATKAYNVTQAFGRRGPEQTQGNFGDQELIRQGTDYKHWPQIAQFAPSASAFFGMSRIGMEVTPSGTWLTYTGAIKLDDKDPNFKDQVILLNKHIDAYKTFPPTEPKKDKKKKADETQALPQRQKKQQTVTLLPAADLDDFSKQLQQSMSRADSTQA

SEQ ID NO: 334 - DNA, 1248 bp, synthetic construct
  misc_feature 1..1248: note = Description of sequence: SARS-COV-2 nucleocapsid phosphoprotein (Omicron B.1.1.529 Variant; DNA sequence
  source 1..1248: mol_type = other DNA
atgagcgacaacggcccccagaaccagagaaacgccctgagaatcaccttcggaggccctagcgacagcaccggctctaatcaaaatggaggcgccagaagcaagcagcggcggcctcagggcctgcctaacaacaccgcctcttggttcaccgctcttacacaacacggcaaggaagatctgaagttccccagaggacagggtgttccaatcaacaccaacagctccccagacgatcagatcggatattacagaagggccactagacgcatcagaggcggcgacggcaagatgaaggacctgagccctagatggtacttctactacctgggcaccggccctgaggccggactgccgtacggcgccaacaaggacggcatcatctgggtggccacagagggcgccctgaacacacctaaggaccacatcggcaccagaaatcctgccaacaacgccgccatcgtgctgcagctgccacagggcaccaccctgcccaagggcttctacgccgagggcagccggggcggcagccaggccagcagcagatcttcttctcgttcccggaacagcagccggaattctacacctggctcctccaagcggaccagccccgctagaatggccggcaatggcggcgatgccgctctggccctgctgctgctcgatagactgaaccagctggaaagcaagatgagcggaaaaggccagcagcagcagggacagacagtgaccaagaaaagcgctgcagaagccagcaaaaaacctagacaaaagagaacagccaccaaggcctacaacgtgacacaggcttttggcagacggggccccgagcagacccagggcaacttcggcgaccaggagctgatccggcagggtacagactacaaacattggccccagatcgcccagttcgcccctagcgccagcgccttcttcggaatgtctagaatcggcatggaagtgaccccttctggcacatggctgacctacaccggcgctattaagctggatgacaaggaccccaacttcaaggaccaagtgatcctgctgaacaagcacatcgacgcctacaagacctttccacctaccgagcctaagaaggataagaaaaagaaagctgacgagacacaggccctgcctcaaagacagaagaagcagcaaaccgtgaccctgctgcctgctgccgatctggacgacttcagcaagcagctgcagcagagcatgagccgggccgacagcacacaggcc

SEQ ID NO: 335 - protein, 1739 aa, synthetic construct
  REGION 1..1739: note = Description of sequence: Exemplary ARV-COV-BA2SN+; Protein sequence
MFVFLVLLPLVSSQCVNLITRTQSYTNSFTRGVYYPDKVFRSSVLHSTQDLFLPFFSNVTWFHAIHVSGTNGTKRFDNPVLPFNDGVYFASTEKSNIIRGWIFGTTLDSKTQSLLIVNNATNVVIKVCEFQFCNDPFLDVYYHKNNKSWMESEFRVYSSANNCTFEYVSQPFLMDLEGKQGNFKNLREFVFKNIDGYFKIYSKHTPINLGRDLPQGFSALEPLVDLPIGINITRFQTLLALHRSYLTPGDSSSGWTAGAAAYYVGYLQPRTFLLKYNENGTITDAVDCALDPLSETKCTLKSFTVEKGIYQTSNFRVQPTESIVRFPNITNLCPFDEVFNATRFASVYAWNRKRISNCVADYSVLYNFAPFFAFKCYGVSPTKLNDLCFTNVYADSFVIRGNEVSQIAPGQTGNIADYNYKLPDDFTGCVIAWNSNKLDSKVGGNYNYLYRLFRKSNLKPFERDISTEIYQAGNKPCNGVAGFNCYFPLRSYGFRPTYGVGHQPYRVVVLSFELLHAPATVCGPKKSTNLVKNKCVNFNFNGLTGTGVLTESNKKFLPFQQFGRDIADTTDAVRDPQTLEILDITPCSFGGVSVITPGTNTSNQVAVLYQGVNCTEVPVAIHADQLTPTWRVYSTGSNVFQTRAGCLIGAEYVNNSYECDIPIGAGICASYQTQTKSHRRARSVASQSIIAYTMSLGAENSVAYSNNSIAIPTNFTISVTTEILPVSMTKTSVDCTMYICGDSTECSNLLLQYGSFCTQLKRALTGIAVEQDKNTQEVFAQVKQIYKTPPIKYFGGFNFSQILPDPSKPSKRSFIEDLLFNKVTLADAGFIKQYGDCLGDIAARDLICAQKFNGLTVLPPLLTDEMIAQYTSALLAGTITSGWTFGAGAALQIPFAMQMAYRFNGIGVTQNVLYENQKLIANQFNSAIGKIQDSLSSTASALGKLQDVVNHNAQALNTLVKQLSSKFGAISSVLNDILSRLDPPEAEVQIDRLITGRLQSLQTYVTQQLIRAAEIRASANLAATKMSECVLGQSKRVDFCGKGYHLMSFPQSAPHGVVFLHVTYVPAQEKNFTTAPAICHDGKAHFPREGVFVSNGTHWFVTQRNFYEPQIITTDNTFVSGNCDVVIGIVNNTVYDPLQPELDSFKEELDKYFKNHTSPDVDLGDISGINASVVNIQKEIDRLNEVAKNLNESLIDLQELGKYEQYIKWPWYIWLGFIAGLIAIVMVTIMLCCMTSCCSCLKGCCSCGSCCKFDEDDSEPVLKGVKLHYTATNFSLLKQAGDVEENPGPMSDNGPQNQRNALRITFGGPSDSTGSNQNGGARSKQRRPQGLPNNTASWFTALTQHGKEDLKFPRGQGVPINTNSSPDDQIGYYRRATRRIRGGDGKMKDLSPRWYFYYLGTGPEAGLPYGANKDGIIWVATEGALNTPKDHIGTRNPANNAAIVLQLPQGTTLPKGFYAEGSRGGSQASSRSSSRSRNSSRNSTPGSSKRTSPARMAGNGGDAALALLLLDRLNQLESKMSGKGQQQQGQTVTKKSAAEASKKPRQKRTATKAYNVTQAFGRRGPEQTQGNFGDQELIRQGTDYKHWPQIAQFAPSASAFFGMSRIGMEVTPSGTWLTYTGAIKLDDKDPNFKDQVILLNKHIDAYKTFPPTEPKKDKKKKADETQALPQRQKKQQTVTLLPAADLDDFSKQLQQSMSRADSTQAALVYFLQSINFVRIRTRSMWSFNPETNILLNVPL

SEQ ID NO: 336 - DNA, 5217 bp, synthetic construct
  misc_feature 1..5217: note = Description of sequence: Exemplary ARV-COV-BA2SN+; DNA sequence
  source 1..5217: mol_type = other DNA
atgttcgtgttcctggtgctgctgcccctggtgagcagccagtgcgtgaacctgatcacccggacccagagctacaccaacagcttcacccggggcgtctactaccccgacaaggtgttccggagcagcgtcctgcacagcacccaggacctgttcctgcccttcttcagcaacgtgacctggttccacgccatccacgtgagcggcaccaacggcaccaagcggttcgacaaccccgtgctgcccttcaacgacggcgtgtacttcgccagcaccgaaaagagcaacatcatccggggctggatcttcggcaccaccctggacagcaagacccagagcctgctgatcgtgaataacgccaccaacgtggtgatcaaggtgtgcgagttccagttctgcaacgaccccttcctggacgtgtactaccacaagaacaacaagagctggatggagagcgagttccgggtgtacagcagcgccaacaactgcaccttcgagtacgtgagccagcccttcctgatggacctggagggcaagcagggcaacttcaagaacctgcgggagttcgtgttcaagaacatcgacggctacttcaagatctacagcaagcacaccccaatcaacctgggccgggatctgccccagggcttctcagccctggagcccctggtggacctgcccatcggcatcaacatcacccggttccagaccctgctggccctgcaccggagctacctgaccccaggcgacagcagcagcgggtggacagcaggcgcggctgcttactacgtgggctacctgcagccccggaccttcctgctgaagtacaacgagaacggcaccatcaccgacgccgtggactgcgccctggaccctctgagcgagaccaagtgcaccctcaagagcttcaccgtggagaagggcatctaccagaccagcaacttccgggtgcagcccaccgagagcatcgtgcggttccccaacatcaccaacctgtgccccttcgacgaggtgttcaacgccacccggttcgccagcgtgtacgcctggaaccggaagcggatcagcaactgcgtggccgactacagcgtgctgtacaacttcgccccattcttcgccttcaagtgctacggcgtgagccccaccaagctgaacgacctgtgcttcaccaacgtgtacgccgacagcttcgtgatccgtggcaacgaggtgagccagatcgcacccggccagacaggcaacatcgccgactacaactacaagctgcccgacgacttcaccggctgcgtgatcgcctggaacagcaacaagctcgacagcaaggtgggcggcaactacaactacctgtaccggctgttccgaaagagcaacctgaagcccttcgagcgggacatcagcaccgagatctaccaagccggcaacaagccttgcaacggcgtggccggcttcaactgctacttccctctgcggagctacggcttccggcccacctacggcgtgggccaccagccctaccgggtggtggtgctgagcttcgagctgctgcacgccccagccaccgtgtgtggccccaagaagagtaccaacctggtgaagaacaagtgcgtgaacttcaacttcaacggccttaccggcaccggcgtgctgaccgagagcaacaagaaattcctgccctttcagcagttcggccgggacatcgccgacaccaccgacgctgtgcgggatccccagaccctggagatcctggacatcaccccttgcagcttcggcggcgtgagcgtgatcaccccaggcaccaacaccagcaaccaggtggccgtgctgtaccagggcgtgaactgcaccgaggtgcccgtggccatccacgccgaccagctgacacccacctggcgggtctacagcaccggcagcaacgtgttccagacccgggccggttgcctgatcggcgccgagtacgtgaacaacagctacgagtgcgacatccccatcggcgccggcatctgtgccagctaccagacccagaccaagtcacaccggagggcaaggagcgtggccagccagagcatcatcgcctacaccatgagcctgggcgccgagaacagcgtggcctacagcaacaacagcatcgccatccccaccaacttcaccatcagcgtgaccaccgagattctgcccgtgagcatgaccaagaccagcgtggactgcaccatgtacatctgcggcgacagcaccgagtgcagcaacctgctgctgcagtacggcagcttctgcacccagctgaagcgggccctgaccggcatcgccgtggagcaggacaagaacacccaggaggtgttcgcccaggtgaagcagatctacaagacccctcccatcaagtacttcggcggcttcaacttcagccagatcctgcccgaccccagcaagcccagcaagcggagcttcatcgaggacctgctgttcaacaaggtgaccctagccgacgccggcttcatcaagcagtacggcgactgcctcggcgacatagccgcccgggacctgatctgcgcccagaagttcaacggcctgaccgtgctgcctcccctgctgaccgacgagatgatcgcccagtacaccagcgccctgttagccggaaccatcaccagcggctggactttcggcgctggagccgctctgcagatccccttcgccatgcagatggcctaccggttcaacggcatcggcgtgacccagaacgtgctgtacgagaaccagaagctgatcgccaaccagttcaacagcgccatcggcaagatccaggacagcctgagcagcaccgctagcgccctgggcaagctgcaggacgtggtgaaccacaacgcccaggccctgaacaccctggtgaagcagctgagcagcaagttcggcgccatcagcagcgtgctgaacgacatcctgagccggctggaccctcccgaggccgaggtgcagatcgaccggctgatcactggccggctgcagagcctgcagacctacgtgacccagcagctgatccgggccgccgagattcgggccagcgccaacctggccgccaccaagatgagcgagtgcgtgctgggccagagcaagcgggtggacttctgcggcaagggctaccacctgatgagctttccccagagcgcaccccacggagtggtgttcctgcacgtgacctacgtgcccgcccaggagaagaacttcaccaccgccccagccatctgccacgacggcaaggcccactttccccgggagggcgtgttcgtgagcaacggcacccactggttcgtgacccagcggaacttctacgagccccagatcatcaccaccgacaacaccttcgtgagcggcaactgcgacgtggtgatcggcatcgtgaacaacaccgtgtacgatcccctgcagcccgagctggacagcttcaaggaggagctggacaagtacttcaagaatcacaccagccccgacgtggacctgggcgacatcagcggcatcaacgccagcgtggtgaacatccagaaggagatcgatcggctgaacgaggtggccaagaacctgaacgagagcctgatcgacctgcaggagctgggcaagtacgagcagtacatcaagtggccctggtacatctggctgggcttcatcgccggcctgatcgccatcgtgatggtgaccatcatgctgtgctgcatgaccagctgctgcagctgcctgaagggctgttgcagctgcggcagctgctgcaagttcgacgaggacgacagcgagcccgtgctgaagggcgtgaagctgcactacaccgccacaaactttagcctgctgaagcaggccggggatgtcgaggaaaaccccggccctatgagcgacaacggcccccagaaccagagaaacgccctgagaatcaccttcggaggccctagcgacagcaccggctctaatcaaaatggaggcgccagaagcaagcagcggcggcctcagggcctgcctaacaacaccgcctcttggttcaccgctcttacacaacacggcaaggaagatctgaagttccccagaggacagggtgttccaatcaacaccaacagctccccagacgatcagatcggatattacagaagggccactagacgcatcagaggcggcgacggcaagatgaaggacctgagccctagatggtacttctactacctgggcaccggccctgaggccggactgccgtacggcgccaacaaggacggcatcatctgggtggccacagagggcgccctgaacacacctaaggaccacatcggcaccagaaatcctgccaacaacgccgccatcgtgctgcagctgccacagggcaccaccctgcccaagggcttctacgccgagggcagccggggcggcagccaggccagcagcagatcttcttctcgttcccggaacagcagccggaattctacacctggctcctccaagcggaccagccccgctagaatggccggcaatggcggcgatgccgctctggccctgctgctgctcgatagactgaaccagctggaaagcaagatgagcggaaaaggccagcagcagcagggacagacagtgaccaagaaaagcgctgcagaagccagcaaaaaacctagacaaaagagaacagccaccaaggcctacaacgtgacacaggcttttggcagacggggccccgagcagacccagggcaacttcggcgaccaggagctgatccggcagggtacagactacaaacattggccccagatcgcccagttcgcccctagcgccagcgccttcttcggaatgtctagaatcggcatggaagtgaccccttctggcacatggctgacctacaccggcgctattaagctggatgacaaggaccccaacttcaaggaccaagtgatcctgctgaacaagcacatcgacgcctacaagacctttccacctaccgagcctaagaaggataagaaaaagaaagctgacgagacacaggccctgcctcaaagacagaagaagcagcaaaccgtgaccctgctgcctgctgccgatctggacgacttcagcaagcagctgcagcagagcatgagccgggccgacagcacacaggccgccttggtgtacttcctgcaaagcatcaacttcgtgagaatccggacgcggagcatgtggagctttaaccccgagaccaacatcctgctgaacgtccccctg

SEQ ID NO: 337 - protein, 19 aa, synthetic construct
  REGION 1..19: note = Description of sequence: Exemplary P2A Protein Sequence
ATNFSLLKQAGDVEENPGP

SEQ ID NO: 338 - DNA, 57 bp, synthetic construct
  misc_feature 1..57: note = Description of sequence: Exemplary P2A DNA Sequence
  source 1..57: mol_type = other DNA
gccacaaactttagcctgctgaagcaggccggggatgtcgaggaaaaccccggccct

SEQ ID NO: 339 - protein, 1081 aa, synthetic construct
  REGION 1..1081: note = Description of sequence: ARV-HSV-mRNA-1 (HSV-2 glycoprotein H and glycoprotein L); Protein sequence
MGPGLWVVMGVLVGVAGGHDTYWTEQIDPWFLHGLGLARTYWRDTNTGRLWLPNTPDASDPQRGRLAPPGELNLTTASVPMLRWYAERFCFVLVTTAEFPRDPGQLLYIPKTYLLGRPRNASLPELPEAGPTSRPPAEVTQLKGLSHNPGASALLRSRAWVTFAAAPDREGLTFPRGDDGATERHPDGRRNAPPPGPPAGAPRHPTTNLSIAHLHNASVTWLAARGLLRTPGRYVYLSPSASTWPVGVWTTGGLAFGCDAALVRARYGKGFMGLVISMRDSPPAEIIVVPADKTLARVGNPTDENAPAVLPGPPAGPRYRVFVLGAPTPADNGSALDALRRVAGYPEESTNYAQYMSRAYAEFLGEDPGSGTDARPSLFWRLAGLLASSGFAFVNAAHAHDAIRLSDLLGFLAHSRVLAGLAARGAAGCAADSVFLNVSVLDPAARLRLEARLGHLVAAILEREQSLAAHALGYQLAFVLDSPAAYGAVAPSAARLIDALYAEFLGGRALTAPMVRRALFYATAVLRAPFLAGAPSAEQRERARRGLLITTALCTSDVAAATHADLRAALARTDHQKNLFWLPDHFSPCAASLRFDLAEGGFILDALAMATRSDIPADVMAQQTRGVASALTRWAHYNALIRAFVPEATHQCSGPSHNAEPRILVPITHNASYVVTHTPLPRGIGYKLTGVDVRRPLFITYLTATCEGHAREIEPKRLVRTENRRDLGLVGAVFLRYTPAGEVMSVLLVDTDATQQQLAQGPVAGTPNVFSSDVPSVALLLFPNGTVIHLLAFDTLPIATIAPGFLAASALGVVMITAALAGILRVVRTCVPFLWRREATNFSLLKQAGDVEENPGPMGFVCLFGLVVMGAWGAWGGSQATEYVLRSVIAKEVGDILRVPCMRTPADDVSWRYEAPSVIDYARIDGIFLRYHCPGLDTFLWDRHAQRAYLVNPFLFAAGFLEDLSHSVFPADTQETTTRRALYKEIRDALGSRKQAVSHAPVRAGCVNFDYSRTRRCVGRRDLRPANTTSTWEPPVSSDDEASSQSKPLATQPPVLALSNAPPRRVSPTRGRRRHTRLRRN

SEQ ID NO: 340 - DNA, 3243 bp, synthetic construct
  misc_feature 1..3243: note = Description of sequence: ARV-HSV-mRNA-1 (HSV-2 glycoprotein H and glycoprotein L); DNA sequence
  source 1..3243: mol_type = other DNA
atgggccccggtctgtgggtggtgatgggcgtactggtaggcgttgccgggggccatgacacgtactggacagagcaaatcgacccgtggttcttgcacggtctggggttggcccgcacgtactggcgcgacacaaacaccgggaggctgtggttgcccaacacccccgacgccagcgacccccagcgcggacgcttggcgcccccgggcgaactcaacctgacaacggcaagcgtgcccatgcttcggtggtacgccgagcgcttttgtttcgtgttggtcaccacggccgagtttccacgggaccccgggcagctgctttacatcccaaagacctatctgctcggccggccacggaacgcgagcctgcccgagcttcccgaggcggggcccacgtccaggccccccgccgaggtgacccagctcaagggactgagccacaaccccggcgcctccgcgctgttgaggtcccgggcctgggtaacattcgcggccgcgccagaccgcgaggggcttacgttcccgcggggagacgacggggcgaccgagaggcacccggacggccgacgcaacgcaccgcccccggggccgcccgcgggagcgccgaggcatccgacgacgaacctgagcattgcgcatctgcacaacgcgtccgtgacatggctggccgccaggggcctgctacggacaccgggtcggtacgtgtacctctccccgagcgcctcgacgtggcccgtgggagtctggacgacgggcgggctggcgttcgggtgcgatgccgcgcttgtgcgcgcgcgatacgggaagggcttcatggggctcgtgatttccatgcgggacagcccaccggccgagatcattgtggtgccagcggacaagaccctcgcacgggtcggaaatccgacagacgaaaacgcccccgcggtgctcccagggccaccagccggccccaggtatcgcgtcttcgtcctgggggccccgacgccagccgacaatggcagcgcgctggacgcactacggcgggtggccggctaccccgaggagagcacgaactacgcacagtatatgagccgggcctatgcggagtttctaggggaggacccgggaagcggcacggacgcgaggccgagcctgttctggcgcctcgcagggctgctcgccagcagcgggtttgcgttcgtcaacgcggcacacgcccacgacgcgattcgcctcagcgacctgctgggctttctagcccacagccgcgtgctggccggcctggccgcccggggagcagcgggctgtgcggccgacagcgtgttcctgaacgtgagcgtgttggacccggcggccaggctgcggcttgaggcgcgcctcggacatctggtggcagcgatcctcgagcgagagcagagcctagcggcgcacgcgctgggctatcagctggcgttcgtgttggacagccccgcggcctatggcgcggtggccccgagcgcggcccgcctgatcgacgcactgtacgccgagtttctcggcggccgcgcgctaaccgccccgatggtccgccgagcgctgttttacgcaacggccgtcctccgggcaccgttcctggcaggcgcgcccagcgccgagcagcgggaacgcgcccgccggggactcctcataaccacggcactgtgtacgagcgacgtagcagcggcgacccacgccgatctccgggccgcgctcgccaggaccgaccaccagaaaaacctcttctggctcccggaccacttttccccatgcgcagcatccctgcgcttcgatctcgccgaaggagggttcatcctggacgcactggccatggccacccgatccgacatcccggcggacgtcatggcacaacagacccgcggcgtggcctccgcacttacgcgctgggcgcactacaacgccctgatccgcgccttcgtcccggaggccacccatcagtgtagcggcccgagccacaacgcggagccccggatcctcgtacccatcacccacaacgccagctatgtcgtcacacacacccccttgccacgcgggatcggatacaagctcacgggcgttgacgtccgccgcccactgtttatcacctatctcaccgccacctgcgaagggcacgcgcgggagattgagccgaaacggctggtgcgcaccgaaaaccggcgcgaccttggcctcgtgggggccgtgtttctgcgctacaccccggccggggaggtcatgagcgtgctgctagtggacacggatgccacccaacagcagctggcccaggggccggtggcgggcaccccgaacgtgttttccagcgatgtaccaagcgtggccctgttattgttccccaatggaacagtgattcatctgctggcctttgacacgctgcccatcgccaccatcgcccccgggttcctggccgcgtccgcgcttggagtcgttatgattaccgcggcactggcaggcatcctcagggtggtccgaacgtgcgtcccatttttgtggagacgcgaagccacgaacttctcactattaaagcaagcaggagacgtggaagaaaaccccggtccaatggggttcgtctgtctgtttgggcttgtcgtaatgggagcctggggggcgtggggaggatcacaggcaaccgaatatgttcttaggagtgttattgccaaagaggtgggggacatactaagagtaccatgcatgcggacccccgcggatgatgtttcatggcgctacgaggccccgagcgttattgactatgccaggatagacggaatatttcttcgctatcactgcccggggcttgacacgttcttgtgggataggcacgcccagagggcatatctggttaatccctttctctttgcggcgggatttttggaggacttgagtcactcagtgtttccggccgacacacaggaaacaacaacgcgcagggccctttataaagagatacgcgatgcgttgggcagtcgaaaacaggccgtcagccacgcacccgtcagggccgggtgtgtaaacttcgactactcaaggacaaggcgctgcgtcgggcgacgcgatttacggccagccaacaccacgtcaacgtgggaaccaccagtgagcagcgacgatgaagcaagctcgcagagcaagcccctcgccacccagccgcccgtcctcgccctttcgaacgcacccccacggcgggtctccccgacgcgaggacggcgccggcatacacgcctccgacgcaat

SEQ ID NO: 341 - protein, 1313 aa, synthetic construct
  REGION 1..1313: note = Description of sequence: ARV-HSV-mRNA-2 (HSV-2 glycoprotein D and glycoprotein B); Protein sequence
MGRLTSGVGTAALLVVAVGLRVVCAKYALADPSLKMADPNRFRGKNLPVLDQLTDPPGVKRVYHIQPSLEDPFQPPSIPITVYYAVLERACRSVLLHAPSEAPQIVRGASDEARKHTYNLTIAWYRMGDNCAIPITVMEYTECPYNKSLGVCPIRTQPRWSYYDSFSAVSEDNLGFLMHAPAFETAGTYLRLVKINDWTEITQFILEHRARASCCYALPLRIPPAACLTSKAYQQGVTVDSIGMLPRFIPENQRTVALYSLKIAGWHGPKPPYTSTLLPPELSDTTNATQPELVPEDPEDSCLLEDPAGTVSSQIPPNWHIPSIQDVAPHHAPAAPSNPGLIIGALAGSTLAVLVIGGIAFWVRRRAQMAPKRLRLPHIRDDDAPPSHQPLFYATNFSLLKQAGDVEENPGPMRGGGLICALVVGALVAAVASAAPAAPRASGGVAATVAANGGPASRPPPVPSPATTRARKRKTKKPPERPEATPPPDANATVAAGHATLRAHLREIKVENADAQFYVCPPPTGATVVQFEQPRRCPTRPEGQNYTEGIAVVFKENIAPYKFKATMYYKDVTVSQVWFGHRYSQFMGIFEDRAPVPFEEVIDKINAKGVCRSTAKYVRNNMETTAFHRDDHETDMELKPAKVATRTSRGWHTTDLKYNPSRVEAFHRYGTTVNCIVEEVDARSVYPYDEFVLATGDFVYMSPFYGYREGSHTEHTSYAADRFKQVDGFYARDLTTKARATSPTTRNLLTTPKFTVAWDWVPKRPAVCTMTKWQEVDEMLRAEYGGSFRFSSDAISTTFTTNLTQYSLSRVDLGDCIGRDAREAIDRMFARKYNATHIKVGQPQYYLATGGFLIAYQPLLSNTLAELYVREYMREQDRKPRNATPAPLREAPSANASVERIKTTSSIEFARLQFTYNHIQRPVNDMLGRIAVAWCELQNHELTLWNEARKLNPNAIASATVGRRVSARMLGDVMAVSTCVPVAPDNVIVQNSMRVSSRPGTCYSRPLVSFRYEDQGPLIEGQLGENNELRLTRDALEPCTVGHRRYFIFGGGYVYFEEYAYSHQLSRADVTTVSTFIDLNITMLEDHEFVPLEVYTRHEIKDSGLLDYTEVQRRNQLHDLRFAAIDTVIRADANAAMFAGLCAFFEGMGDLGRAVGKVVMGVVGGVVSAVSGVSSFMSNPFGALAVGLLVLAGLVAAFFAFRYVLQLQRNPMKALYPLTTKELKTSDPGGVGGEGEEGAEGGGFDEAKLAEAREMIRYMALVSAMERTEHKARKKGTSALLSSKVTNMVLRKRNKARYSPLHNEDEAGDEDEL

SEQ ID NO: 342 - DNA, 3939 bp, synthetic construct
  misc_feature 1..3939: note = Description of sequence: ARV-HSV-mRNA-2 (HSV-2 glycoprotein D and glycoprotein B); DNA sequence
  source 1..3939: mol_type = other DNA
atggggcgattgacctccggcgtcgggacggcggccctgctagtagtcgcggtgggactccgcgtcgtctgcgccaaatacgccttagcagaccccagccttaagatggccgatcccaatcgatttcgcgggaagaaccttccggtattggaccagctgaccgacccccccggggtgaagcgagtataccacatacagccgagcctggaggacccgttccagccccccagcatcccgatcacagtgtactacgcagtgctggaacgagcctgccgcagcgtgctcctacatgccccaagcgaggccccccagatcgtgcgcggggcatccgacgaggcccgaaagcacacgtacaacctgaccatcgcctggtatcgcatgggagacaattgcgcaatccccatcacggtaatggaatacaccgagtgcccctacaacaagagcttgggggtctgccccatccgaacgcagccccgctggagctactatgacagctttagcgccgtcagcgaggataacctgggattcctgatgcacgcccccgccttcgagaccgcgggaacgtacctgcggctagtgaagataaacgactggacggagatcacacaatttatcctggagcaccgggcccgcgcctcctgctgctacgcactccccctgcgcatccccccggcagcgtgcctcaccagcaaggcctaccaacagggcgtgacggtcgacagcatcgggatgctaccccgctttatccccgaaaaccagcgcaccgtcgccctatacagcttaaaaatcgccggctggcacggccccaagcccccgtacaccagcaccctgctgccgccggagctttccgacaccaccaacgccacgcaacccgaactcgtaccggaagaccccgaggacagctgcctcttagaggatcccgccgggacggtgtcatcacagatccccccaaactggcacatcccgtcgatccaggacgtcgcgccgcaccacgcccccgccgcccccagcaacccgggcctgatcatcggcgcgctggccggcagtaccctggcggtgctggtcatcggcggaatagcgttttgggtacgccgccgcgcacagatggcccccaagcgcctacgactcccccacatccgggatgacgacgcgccccccagccaccagccattgttttacgccacgaacttctcactgttaaagcaagcaggagacgtggaagaaaaccccggaccaatgcgcggggggggcttgatatgcgcgctggtcgtgggggcgctggtggccgcggtggcgtcggcggccccggcggccccccgcgccagcggcggcgtggccgcgaccgtcgcggcgaacgggggacccgcctcccggccgccccccgtcccgagccccgcgaccaccagggcccggaagcggaaaaccaaaaagccgcccgagcggcccgaggcgaccccgccccccgacgccaacgcgaccgtcgccgccggccacgccacgctgcgcgcgcacctgcgggaaatcaaggtcgagaacgccgatgcccagttttacgtgtgcccacccccgacaggcgccacggtggtgcagtttgagcagccgcgccgctgcccgacgcgcccggaggggcagaactacacggagggcatcgcggtggtcttcaaggagaacatcgccccgtacaaattcaaggccaccatgtactacaaagacgtgaccgtgtcgcaggtgtggttcggccaccgctactcccagtttatggggatattcgaggaccgcgcccccgtacccttcgaggaggtgatcgacaagataaacgccaagggggtctgccgctccacggccaagtacgtgcggaacaacatggagaccaccgcgtttcaccgggacgaccacgagaccgacatggagctcaagccggcgaaggtcgccacgcgcacgagccgggggtggcacaccaccgacctcaagtacaaccccagccgggtggaggcgttccatcggtacggcacgacggtcaactgcatcgtcgaggaggtggacgcgcggtcggtgtacccgtacgatgagtttgtgctggcgacgggcgactttgtgtacatgtccccgttttacggctaccgggaggggagccacaccgagcacaccagctacgccgccgaccgcttcaagcaggtcgacggcttctacgcgcgcgacctcaccacgaaggcccgggccacgagcccgacgacccgcaacttgctgacgacccccaagtttaccgtggcctgggactgggtgccgaagcgaccggcggtctgcaccatgaccaagtggcaggaggtggacgagatgctccgcgccgagtacggcggctccttccgcttctcctccgacgccatcagcaccaccttcaccaccaacctgacccagtacagcctcagccgcgtcgacctgggcgactgcatcggccgggatgcccgcgaggccatcgaccgcatgtttgcgcgcaagtacaacgccacgcacatcaaggtgggccagccgcagtactacctggccacggggggcttcctcatcgcgtaccagcccctcctcagcaacacgctcgccgagctgtacgtgcgggagtacatgcgggagcaggaccgcaagccccggaatgccacgcccgcgccactgcgggaggcgcccagcgccaacgcgagcgtggagcgcatcaagaccaccagcagcatcgagttcgcccggctgcagtttacgtataaccatatacagcgccccgtgaacgacatgctggggcgcatcgccgtcgcgtggtgcgagctgcagaaccacgagctgacactctggaacgaggcccgcaagctcaaccccaacgccatcgccagcgccaccgtcggccggcgggtgagcgcgcgcatgctcggagacgtcatggccgtctccacgtgcgtgcccgtcgccccggacaacgtgatcgtgcagaacagcatgcgcgtcagcagccggccggggacgtgctacagccgccccctggtcagctttcggtacgaagaccagggcccgctgatcgaggggcagctgggcgagaacaacgagctgcgcctcacccgcgacgcgctcgagccgtgcaccgtgggccaccggcgctacttcatcttcggcgggggctacgtatacttcgaggagtacgcgtactcacaccagctgagtcgcgccgacgtcaccaccgtcagcaccttcatcgacctgaacatcaccatgctggaggaccacgagtttgtgcccctggaggtctacacgcgccacgagatcaaggacagcggcctgctggactacacggaggtccagcgccgcaaccagctgcacgacctgcgctttgccgccatcgacacggtcatccgcgccgacgccaacgccgccatgttcgcggggctgtgcgcgttcttcgaggggatgggggacttggggcgcgcggtcggcaaggtcgtcatgggagtagtggggggcgtggtgagcgccgtcagcggcgtgagctcctttatgtccaaccccttcggggcgcttgccgtggggctactggtcctggccggcctggtcgcggccttcttcgccttccgctacgtcctgcaactgcaacgcaatcccatgaaggccctgtatccgctcaccaccaaggaactcaagacatccgaccccgggggcgtgggcggggagggggaggaaggcgcggaggggggcgggtttgacgaggccaagttggccgaggcccgagaaatgatccgatatatggcattggtgagcgccatggagcgcacggaacacaaggccagaaagaagggcacgagcgccctgctcagctccaaggtcaccaacatggtactgcgcaagcgcaacaaagccaggtactcaccgctccacaacgaggacgaggccggagacgaagacgagctc

SEQ ID NO: 343 - protein, 1243 aa, synthetic construct
  REGION 1..1243: note = Description of sequence: ARV-HSV-mRNA-3 (HSV-2 UL19UD and Multi-T-cell-Epitopes); Protein sequence
MGFEAGLMDAATPPARPPAERQGSPTPADATRYLPIAGASSVVALAPYVNKTVTGDCLPVLDMETGHIGAYVVLVDQTGNVADLLRAAAPAWSRRTLLPEHARNCVRPPDYPTPPASEWNSLWMTPVGNMLFDQGTLVGALDFGAGPMRARPRGEVRFLHYDEAGYALYRDSSSDDDESRDTARPRRSASVAGSHGPGPARAPPPPGGPVGAGGRSHAPPARTPKMTRGAPKASATPATDPARGRRPAQASGPHETITALVGAARHASPFERVRCLLLRSEGRKSRRPLTTFGSGAAAPAWSRRTLLPEHHNLFLWEDQTLLRATKNACPLLIFDRTRKFVLACPYADRLDNRLQLGMLIPGAVKRFGGHYMESVFQMYTRIAILGILVHLRIRTREASFEEETHFTQYLIYDASPLKGLSAMKTSNALCVRGARPFSHFPALMLEYFCRCAREESKRVDTSMSLADFHGEEFEKLYETQYLIYDASPLKGLSLTRMAEYDRVHIYYNHRISNQALLRMACEVRQGNWTGAPDVSALGAQGMGFLVDAIVRVAINGLLGLADTVVACVACRRLGPADRRFVALSGSLEVWASDSLNNEYLRLAAQREAAGVYDAVRTWGPATNFSLLKQAGDVEENPGPRLSMENAVGTVCHPSLMNIDAAVGGVNHDPVEAANPYGAYVAAPAGPGADMQQRFLNAWRQRLAHGRVRWVAECQMTAEQFMQPDNANLALELHPAFDFFAGVADVELPGGEVPPAGPGAIQATWRVVNGNLPLALCPVAFRDARGLELGVGRHAMAPATIAAVRGAFEDRSYPAVFYLLQAAIHGSEHVFCALARLVTQCITSYWNNTRCAAFVNDYSLVSYIVTYLGGDLPEECMAVYRDLVAHVEALAQLVDDFTLPGPELGGQAQAELNHLMRDPALLPPLVWDCDGLMRHAALDRHRDCRIDAGGHEPVYAAACNVATADFNRNDGRLLHNTQARAADAADDRPHRPADWTVHHKIYYYVLVPAFSRGRCCTAGVRFDRVYATLQNMVVPEIAPGEECPSDPVTDPAHPLHPANLVANTVNAMFHNGRVVVDGPAMLTLQVLAHNMAERTTALLCSAAPDAGANTASTANMRIFDGALHAGVLLMAPQHLDHTIQNGEYFYVLPVHALFAGADHVANAPNFPPALRDLARHVPLVPPALGANYFSSIRQPVVQHARESAAGENALTYALMAGYFKMSPVALYHQLKTGLHPGFGFTVVR

SEQ ID NO: 344 - DNA, 3729 bp, synthetic construct
  misc_feature 1..3729: note = Description of sequence: ARV-HSV-mRNA-3 (HSV-2 UL19UD and Multi-T-cell-Epitopes); DNA sequence
  source 1..3729: mol_type = other DNA
atgggcttcgaggccggcctgatggacgccgcgaccccgccggcccgaccgcccgcggaacggcaaggcagcccgacccccgcagacgccacccggtacctgccgatcgccggcgccagcagcgtcgtggcgctggccccctacgtgaacaagaccgtgaccggcgactgcctcccggtcctggacatggaaaccggccacatcggcgcatacgtggtgctggtggaccagacaggcaacgtggccgacctgctgcgggccgcagcccccgcgtggagcaggcggaccctactgcccgagcacgcccgcaactgcgtgcgacccccggactacccgaccccgccagcgagcgagtggaacagcctgtggatgaccccggtgggcaacatgctgttcgaccagggcacactggtgggcgccctcgacttcggcgccggcccgatgagagcccgaccaagaggcgaggtgcgcttcctgcactacgacgaggccgggtacgccctgtacagggacagcagcagcgacgacgacgagagccgggacaccgcccgccccagacggagcgccagcgtggccgggagccacggcccgggccccgccagagcgccgccgccgccaggggggccggtgggggccgggggacgaagccacgccccgccggcgagaacaccgaagatgacgcgcggcgccccgaaggccagcgcgacccccgccaccgacccggcccggggacgccgcccggcccaggccagcggcccgcacgaaacaatcacagccctggtgggcgccgcgcggcacgccagccccttcgagcgggtcaggtgcctgctgctcagaagcgagggccggaaaagccgcagaccgctaacgaccttcggcagcggcgccgcggccccggcctggagccggcgaaccctgctgcccgagcaccacaacctgttcctgtgggaggaccagaccctgctgcgggccaccaagaacgcctgccccctcctgatcttcgacagaacccgcaagttcgtgctggcctgcccctacgccgacaggctggacaaccgcctgcaactgggaatgctgatcccgggagccgtgaagcggttcggcggccactacatggaaagcgtgttccagatgtacacccggatcgcgatcctgggcatcctggtgcacctgcggatcagaacccgggaggcgagcttcgaagaagaaacccacttcacccagtacctgatctacgacgccagcccgctgaagggcctgagcgccatgaaaacaagcaacgcgctgtgcgtaaggggcgcccggccattcagccacttcccggcgctgatgctggagtacttctgcagatgcgccagagaagagagcaaacgcgtggacacaagcatgagcctggcagacttccacggcgaggagttcgagaagctgtacgagacacagtacctgatctacgacgccagcccactgaagggcctgagcctgacccggatggcagagtacgaccgggtgcacatctactacaaccaccggatcagcaaccaggcgctgctgaggatggcctgcgaggtgcgccagggcaactggaccggggcgccggacgtgagcgcgctgggcgcgcagggcatgggcttcctggtggacgcgatcgtccgggtggcgataaacggcctcctggggctggcggacaccgtggtggcctgcgtggcgtgcagacgcctgggccccgcggacagacggttcgtggccctgagcggcagcctggaggtgtgggccagcgacagcctgaacaacgagtacctgcgcctggcggcccagcgggaggcggccggcgtgtacgacgcggtccggacctggggcccggccaccaacttcagcctgctgaagcaggcgggggacgtggaagagaaccccggcccgaggctgagcatggaaaacgcggtgggcacagtctgccaccccagcctgatgaacatcgacgccgccgtgggcggcgtgaaccacgaccccgtggaagccgccaacccgtacggcgcctacgtggccgccccagccggccccggcgccgacatgcagcagcggttcctgaacgcctggcggcaacggctggcccacggacgggtgagatgggtggccgagtgccagatgaccgcggagcagttcatgcagccggacaacgccaacctggccctggagctgcaccccgccttcgacttcttcgccggagtggccgacgtggagctgccgggcggagaggtgccgccggccggaccgggcgccatccaggcaacgtggcgggtagtgaacggcaacctgcccctggccctctgccccgtggccttccgggacgccagaggactcgagctgggcgtaggcagacacgccatggccccggcgaccatcgcggcggtgcgcggcgcattcgaggaccggagctaccccgccgtgttctacctgctgcaggccgccatccacggaagcgaacacgtgttctgcgccctcgcccggctggtcacccaatgcatcacgagctactggaacaacaccagatgcgccgcgttcgtgaacgactacagcctcgtgagctacatcgtgacctacctgggcggcgacctgccggaggagtgcatggcggtctaccgagacctggtcgcccacgtggaggccctggcccagctggtggacgacttcaccctgcccggcccggagctgggcgggcaggcccaggccgagctgaaccacctgatgcgggacccggcactgctcccgccgctggtgtgggactgcgacggcctgatgcgccacgccgccctggacagacaccgggactgcaggatcgacgccggaggccacgaaccggtgtacgccgccgcctgcaacgtggccaccgccgacttcaaccgcaacgacggccggctgctgcacaacacacaggccagggcggcagacgccgccgacgaccggccccacagacccgccgactggacggtccaccacaagatctactactacgtgctggtgccggcgttcagcaggggccggtgctgcaccgcgggcgtgcggttcgaccgggtgtacgccacactgcaaaacatggtggtgcccgaaatcgccccgggcgaggaatgcccgagcgaccccgtgacggacccggcgcacccgctgcacccggcgaacctggtggcgaacaccgtgaacgccatgttccacaacggcagagtggtggtggacggcccggcgatgctgaccctgcaggtgctggcgcacaacatggccgagcggaccacagcgctgctgtgcagcgccgcgcccgacgcgggggccaacaccgccagcaccgccaacatgcggatcttcgacggcgccctgcacgccggcgtcctgctgatggcgccccagcacctggaccacacgatccagaacggagagtacttctacgtgctgccggtgcacgccctgttcgccggggcggaccacgtcgcgaacgcccccaacttcccgcccgcgctgcgggacctggcccgccacgtgccgctggtccccccggccctgggcgcgaactacttcagcagcatcagacaaccggtggtccagcacgcgcgcgagagcgccgccggagagaacgccctcacctacgccctcatggccggctacttcaagatgagcccggtggcgctgtaccaccagctgaaaaccggcctgcacccgggcttcggcttcaccgtggtgcgg

SEQ ID NO: 345 - protein, 839 aa, synthetic construct
  REGION 1..839: note = Description of sequence: ARV-HSV-mRNA-4 (HSV-2 glycoprotein E and glycoprotein C); Protein sequence
MRMQLLLLIALSLALVTNSRTSWKRVTSGEDVVLLPAPAGPEERTRAHKLLWAAEPLDACGPLRPSWVALWPPRRVLETVVDAACMRAPEPLAIAYSPPFPAGDEGLYSELAWRDRVAVVNESLVIYGALETDSGLYTLSVVGLSDEARQVASVVLVVEPAPVPTPTPDDYDEEDDAGVSERTPVSVPPPTPPRRPPVAPPTHPRVIPEVSHVRGVTVHMETPEAILFAPGETFGTNVSIHAIAHDDGPYAMDVVWMRFDVPSSCAEMRIYEACLYHPQLPECLSPADAPCAVSSWAYRLAVRSYAGCSRTTPPPRCFAEARMEPVPGLAWLASTVNLEFQHASPQHAGLYLCVVYVDDHIHAWGHMTISTAAQYRNAVVEQHLPQRQPEPVEPTRPHVRAATNFSLLKQAGDVEENPGPMRMQLLLLIALSLALVTNSASPGRTITVGPRGNASNAAPSASPRNASAPRTTPTPPQPRKATKSKASTAKPAPPPKTGPPKTSSEPVRCNRHDPLARYGSRVQIRCRFPNSTRTEFRLQIWRYATATDAEIGTAPSLEEVMVNVSAPPGGQLVYDSAPNRTDPHVIWAEGAGPGASPRLYSVVGPLGRQRLIIEELTLETQGMYYWVWGRTDRPSAYGTWVRVRVFRPPSLTIHPHAVLEGQPFKATCTAATYYPGNRAEFVWFEDGRRVFDPAQIHTQTQENPDGFSTVSTVTSAAVGGQGPPRTFTCQLTWHRDSVSFSRRNASGTASVLPRPTITMEFTGDHAVCTAGCVPEGVTFAWFLGDDSSPAEKVAVASQTSCGRPGTATIRSTLPVSYEQTEYICRLAGYPDGIPVLEHH

SEQ ID NO: 346 - DNA, 2520 bp, synthetic construct
  misc_feature 1..2520: note = Description of sequence: ARV-HSV-mRNA-4 (HSV-2 glycoprotein E and glycoprotein C); DNA sequence
  source 1..2520: mol_type = other DNA
atgcgcatgcagctgctgctgctgatcgccctgtccctggccctggtgaccaactcccgcacctcctggaagcgcgtgacctccggcgaggacgtggtgctgctgcccgcccccgccggccccgaggagcgcacccgcgcccacaagctgctgtgggccgccgagcccctggacgcctgcggccccctgcgcccctcctgggtggccctgtggcccccccgccgcgtgctggagaccgtggtggacgccgcctgcatgcgcgcccccgagcccctggccatcgcctactccccccccttccccgccggcgacgagggcctgtactccgagctggcctggcgcgaccgcgtggccgtggtgaacgagtccctggtgatctacggcgccctggagaccgactccggcctgtacaccctgtccgtggtgggcctgtccgacgaggcccgccaggtggcctccgtggtgctggtggtggagcccgcccccgtgcccacccccacccccgacgactacgacgaggaggacgacgccggcgtgtccgagcgcacccccgtgtccgtgcccccccccacccccccccgccgcccccccgtggccccccccacccacccccgcgtgatccccgaggtgtcccacgtgcgcggcgtgaccgtgcacatggagacccccgaggccatcctgttcgcccccggcgagaccttcggcaccaacgtgtccatccacgccatcgcccacgacgacggcccctacgccatggacgtggtgtggatgcgcttcgacgtgccctcctcctgcgccgagatgcgcatctacgaggcctgcctgtaccacccccagctgcccgagtgcctgtcccccgccgacgccccctgcgccgtgtcctcctgggcctaccgcctggccgtgcgctcctacgccggctgctcccgcaccaccccccccccccgctgcttcgccgaggcccgcatggagcccgtgcccggcctggcctggctggcctccaccgtgaacctggagttccagcacgcctccccccagcacgccggcctgtacctgtgcgtggtgtacgtggacgaccacatccacgcctggggccacatgaccatctccaccgccgcccagtaccgcaacgccgtggtggagcagcacctgccccagcgccagcccgagcccgtggagcccacccgcccccacgtgcgcgcctaagccacgaacttctcactattaaagcaagcaggagacgtggaagaaaaccccggtccaatgcgcatgcagctgctgctgctgatcgccctgtccctggccctggtgaccaactccgcctcccccggccgcaccatcaccgtgggcccccgcggcaacgcctccaacgccgccccctccgcctccccccgcaacgcctccgccccccgcaccacccccacccccccccagccccgcaaggccaccaagtccaaggcctccaccgccaagcccgcccccccccccaagaccggcccccccaagacctcctccgagcccgtgcgctgcaaccgccacgaccccctggcccgctacggctcccgcgtgcagatccgctgccgcttccccaactccacccgcaccgagttccgcctgcagatctggcgctacgccaccgccaccgacgccgagatcggcaccgccccctccctggaggaggtgatggtgaacgtgtccgccccccccggcggccagctggtgtacgactccgcccccaaccgcaccgacccccacgtgatctgggccgagggcgccggccccggcgcctccccccgcctgtactccgtggtgggccccctgggccgccagcgcctgatcatcgaggagctgaccctggagacccagggcatgtactactgggtgtggggccgcaccgaccgcccctccgcctacggcacctgggtgcgcgtgcgcgtgttccgccccccctccctgaccatccacccccacgccgtgctggagggccagcccttcaaggccacctgcaccgccgccacctactaccccggcaaccgcgccgagttcgtgtggttcgaggacggccgccgcgtgttcgaccccgcccagatccacacccagacccaggagaaccccgacggcttctccaccgtgtccaccgtgacctccgccgccgtgggcggccagggccccccccgcaccttcacctgccagctgacctggcaccgcgactccgtgtccttctcccgccgcaacgcctccggcaccgcctccgtgctgccccgccccaccatcaccatggagttcaccggcgaccacgccgtgtgcaccgccggctgcgtgcccgagggcgtgaccttcgcctggttcctgggcgacgactcctcccccgccgagaaggtggccgtggcctcccagacctcctgcggccgccccggcaccgccaccatccgctccaccctgcccgtgtcctacgagcagaccgagtacatctgccgcctggccggctaccccgacggcatccccgtgctggagcaccac

SEQ ID NO: 347 - protein, 786 aa, synthetic construct
  REGION 1..786: note = Description of sequence: ARV-MPX-mRNA-1 (MPX viral proteins of M1R, A35R and B6R); Protein sequence
MGAAASIQTTVNTLSERISSKLEQEANASAQTKCDIEIGNFYIRQNHGCNITVKNMCSADADAQLDAVLSAATETYSGLTPEQKAYVPAMFTAALNIQTSVNTVVRDFENYVKQTCNSSAVVDNKLKIQNVIIDECYGAPGSPTNLEFINTGSSKGNCAIKALMQLTTKATTQIAPRQVAGTGVQFYMIVIGVIILAALFMYYAKRMLFTSTNDKIKLILANKENVHWTTYMDTFFRTSPMIIATTDIQNATNFSLLKQAGDVEENPGPMMTPENDEEQTSVFSATVYGDKIQGKNKRKRVIGLCIRISMVISLLSMITMSAFLIVRQNQCMSANEAAITDSAVAVAAASSTHRKVASSTTQYDHKESCNGLYYQGSCYILHSDYKSFEDAKANCAAESSTLPNKSDVLTTWLIDYVEDTWGSDGNPITKTTSDYQDSDVSQEVRKYFCTATNFSLLKQAGDVEENPGPMKTISVVTLLCVLPAVVYSTCTVPTMNNAKLTSTETSFNDKQKVTFTCDSGYHSLDPNAVCETDKWKYENPCKKMCTVSDYVSELYDKPLYEVNSTMTLSCNGETKYFRCEEKNGNTSWNDTVTCPNAECQPLQLEHGSCQPVKEKYSFGEYMTINCDVGYEVIGVSYISCTANSWNVIPSCQQKCDIPSLSNGLISGSTFSIGGVIHLSCKSGFTLTGSPSSTCIDGKWNPILPTCVRSNEEFDPVDDGPDDETDLSKLSKDVVQYEQEIESLEATYHIIIMALTIMGVIFLISIIVLVCSCDKNNDQYKFHKLLP

SEQ ID NO: 348 - DNA, 2692 bp, synthetic construct
  misc_feature 1..2692: note = Description of sequence: ARV-MPX-mRNA-1 (MPX viral proteins of M1R, A35R and B6R); DNA sequence
  source 1..2692: mol_type = other DNA
taatacgactcactatagggagagagataaacataaacataaacgacaagaaacacatacaaaagaaacagaacagaaaacagccaccatgggagccgctgcttccattcaaacaaccgtgaacaccctgtctgaaagaatcagcagcaagctggaacaagaggccaatgccagcgcccagaccaagtgcgacatcgaaatcggcaatttctacatcagacagaatcacggttgtaatatcaccgtgaaaaacatgtgcagcgccgacgctgatgcccagctcgacgccgtcctgtctgctgctacagagacatattctggcctgactcccgaacagaaggcctacgtccccgccatgttcaccgccgccctgaacatccagacatctgtgaacaccgttgtgcgagatttcgagaactacgtgaagcagacatgcaatagcagcgccgtggtcgacaacaagctgaagatccagaacgtgatcatcgacgagtgctacggcgcccctggcagccccaccaacctggagttcatcaacaccggcagcagcaagggcaactgcgccatcaaagccctcatgcagctgaccaccaaggccacaacccaaatcgcccctagacaagtggccggcaccggcgttcaattttacatgatcgtgattggcgtgatcatcctggctgcgctgttcatgtactacgccaaacggatgctgtttaccagcaccaatgacaagatcaagctgatcctggccaacaaggaaaacgtgcactggaccacatacatggacaccttcttcagaaccagccctatgatcattgccaccaccgatatccagaacgccacaaacttcagcctgctgaagcaggccggagatgtcgaggaaaacccaggccccatgatgacacctgaaaatgatgaggaacagaccagcgttttcagcgcaacagtgtacggcgataagatccagggcaagaacaagcggaagagagtgatcggcctgtgcatcagaatcagcatggtgatcagcctgctgagcatgatcaccatgagcgccttcctgatcgtgcggcagaaccagtgcatgagcgcaaatgaggccgctatcaccgatagcgccgtggccgtggccgctgctagctctacccacagaaaggtggccagcagcacaacccagtacgaccacaaggagtcttgcaacggcctgtactaccagggctcttgttacatcctgcacagcgactataagtcattcgaggacgccaaggctaactgcgccgccgagagcagcaccctgcctaacaagtccgacgtgctgaccacttggctgatcgactacgtggaggacacatggggctccgatggcaatcctatcaccaaaaccacatccgactatcaggacagcgacgtgagccaggaggtgcggaagtacttctgcaccgccacaaacttcagcctgctgaaacaggccggggacgtggaagagaacccaggacctatgaagaccatctctgtggtgacccttctttgcgtgctgcctgccgtggtctacagcacctgcaccgtgcccaccatgaacaacgccaagctcacatccaccgaaacaagcttcaacgacaagcagaaagtgaccttcacctgcgacagcggatatcattctctggaccccaacgcagtgtgcgagacagacaagtggaaatacgagaatccttgtaaaaagatgtgtacagtgtccgattacgtgtccgagctgtacgataagcctctgtacgaggtgaattctaccatgaccctgagctgtaatggagagacgaagtattttagatgcgaggaaaagaacggcaacacaagctggaacgatacagtcacctgtcctaacgctgaatgccagcccctgcagctggagcacggcagttgccagcctgtgaaagagaagtacagctttggcgagtacatgaccatcaactgcgacgtgggctacgaggtgattggcgtcagctacatctcttgtaccgccaacagctggaatgtgatccctagctgtcagcagaagtgcgacatccccagcctgagcaacggactgatctccggctctacctttagcatcggcggagtgatccacctgagctgcaaaagcggcttcaccctgaccggctccccttctagtacatgcatcgatggaaagtggaaccccattctgccaacctgtgtgaggtccaacgaggaattcgaccctgtggacgacggccctgatgatgaaaccgacctgtcaaagctgtcaaaggacgtggtgcagtacgagcaggagatcgagagcctggaagccacataccacatcattatcatggccctgacaatcatgggcgtgatcttcctgatctctatcatcgtgctggtgtgcagctgtgataagaacaacgaccagtacaagttccacaagctgctgccttgacgtacggctggagcctcggtggcctagcttcttgccccttgggcctccccccagcccctcctccccttcctgcacccgtacccccgtggtctttgaataaagtctgagtgggcggcaaaaaaaaaaaaaaaaaaaaaaaaaaaaaagcatatgactaaaaaaaaaaaaaaaaaaaaaaaaaaaaaaaaaaaaaaaaaaaaaaaaaaaaaaaaaaaaaaaaaaaaaaaaaagaagagcaagctt

SEQ ID NO: 349 - protein, 741 aa, synthetic construct
  REGION 1..741: note = Description of sequence: ARV-MPX-mRNA-2 (MPX viral proteins of IFNbp (B16R), F3L and Multiple T cell Epitopes (MTE); Protein sequence
MMKMKMMVRIYFVSLSLLLFHSYAIDIENEITEFFNKMRDTLPAKDSKWLNPVCMFGGTMNDMAALGEPFSAKCPPIEDSLLSHRYKDYVVKWERLEKNRRRQVSNKRVKHGDLWIANYTSKFSNRRYLCTVTTKNGDCVQGVVRSHVWKPSSCIPKTYELGTYDKYGIDLYCGILYAKHYNNITWYKDNKEINIDDFKYSQAGKELIIHNPELEDSGRYDCYVHYDDVRIKNDIVVSRCKILTVIPSQDHRFKLILDPKINVTIGEPANITCSAVSTSLFVDDVLIEWENPSGWIIGLDFGVYSILTSRGGITEATLYFENVTEEYIGNTYTCRGHNYYFDKTLTTTVVLEATNFSLLKQAGDVEENPGPMEKREVNKALYDLQRSTMVYSSDDTPPRWSTTMDADTRPTDSDADAIIDDVSREKSMREDNKSFDDVIPVKKIIYWKGVNPVTVINEYCQITRRDWSFRIESVGPSNSPTFYACVDIDGRVFDKADGKSKRDAKNNAAKLAVDKLLSYVIIRFATNFSLLKQAGDVEENPGPSLTILDDNLYKVYNGRRGKIDYYIPYVEDFVRHCLTEYILWVSHRYMSNLFDIPLLTVYWPCVDAVKDVTITKKNNIDHIVWINNSWKFNSERKKTYNDHIVNLLFCLSTEERHIFLDYKKYYFTFLVIAINAMFNSYMSNLFDIPLLTVYWPVRHCLTEYILWVSHRYDVSLSAYIIRVTTAEDNYPSNKNYEITLR

SEQ ID NO: 350 - DNA, 2557 bp, synthetic construct
  misc_feature 1..2557: note = Description of sequence: ARV-MPX-mRNA-2 (Monkeypox (MPX) viral proteins of IFNbp (B16R), F3L and Multiple T cell Epitopes (MTE); DNA sequence
  source 1..2557: mol_type = other DNA
taatacgactcactatagggagagagataaacataaacataaacgacaagaaacacatacaaaagaaacagaacagaaaacagccaccatgatgaagatgaagatgatggtcagaatctacttcgtgtccctgagcctgttgctgtttcacagctacgctatcgacatcgagaacgagatcaccgagttcttcaacaagatgcgcgacactctgcctgccaaggacagcaagtggctgaaccctgtgtgcatgttcggcggaaccatgaacgacatggccgctctgggagaacccttcagcgccaagtgccctcctatcgaggattctctcctgagccacagatacaaggactacgtggtcaagtgggaaagactggaaaaaaaccggagaaggcaggtgtccaacaagcgggtgaaacacggagatctgtggatcgccaattacacctccaagttcagcaacagacggtacctgtgcaccgttacaacaaagaacggcgattgcgtgcaaggcgtggtgcggtcccacgtgtggaaacctagcagctgcatccccaagacctacgagctgggcacctatgataagtacggcatagatctgtattgcggcatcctgtacgctaaacactacaacaacatcacctggtacaaggacaacaaggaaatcaatatcgatgacttcaagtacagccaggctggcaaagagcttattatccacaaccctgagctggaagatagcggaagatacgactgctacgtgcactacgacgacgtgcggatcaagaatgacattgtggtgtctagatgcaagatcctgaccgtgatcccttctcaggaccaccggttcaaactgatcctcgatcctaagatcaatgtgaccattggcgagcccgccaacatcacctgtagcgccgtgtccaccagcctgttcgtggatgatgttctgatcgagtgggagaatcctagtggatggatcatcggcctggacttcggcgtttacagcatcctgacaagccggggaggcatcaccgaggccaccctgtacttcgagaacgtgaccgaggaatacatcgggaacacctacacctgcagaggccacaattactacttcgacaagaccctgaccacaacagtggtgctggaagccacaaacttcagcctgctgaagcaggccggcgacgttgaggaaaatcctggccctatggaaaagagagaggtgaacaaggccctgtacgacctgcagcggtctacaatggtgtacagcagcgacgatacccctccaagatggtccaccaccatggacgctgatacaagacctaccgactccgacgccgacgctatcatcgacgacgtgagcagagaaaagtctatgagagaggataacaaaagcttcgacgacgtgattccagtcaaaaagatcatctactggaagggcgtgaatccagtgaccgtgattaacgagtactgtcagatcacaagaagagactggagctttagaatcgagagcgtgggccctagcaactctcctacattctacgcttgtgtggacatcgacggcagagtctttgataaggccgacggcaagagcaagcgggacgccaaaaacaacgccgccaagctggccgtggacaagctgctgagctacgtgatcattagattcgccaccaacttcagcctgctgaaacaggccggcgatgttgaagagaaccccggccccagcctgaccatcctggacgacaacctgtacaaggtctacaacggccggcggggcaagatcgactactacatcccctacgtggaagatttcgtgcgccactgtctgaccgagtacatcctgtgggtctcccaccggtacatgagcaacctgttcgacattcctctgctgactgtgtactggccttgtgtggacgccgtgaaggacgtgaccatcacaaaaaagaacaatatcgatcacatcgtgtggatcaacaactcttggaagtttaacagtgaaagaaagaagacctacaacgaccacatcgtgaacctgctgttctgcctgagcacagaagagagacacatcttcctggactataagaagtactacttcacctttctggtgatcgccatcaacgccatgttcaacagctacatgtctaacctgtttgacatccccctgctgacagtgtattggcccgtgaggcattgcctgacggaatacatcctgtgggtgtctcatagatacgacgtgagcctgagcgcatacatcatccgggtgacaacagccgaggacaattatccttctaataaaaactatgagatcaccctcagatgacgtacggctggagcctcggtggcctagcttcttgccccttgggcctccccccagcccctcctccccttcctgcacccgtacccccgtggtctttgaataaagtctgagtgggcggcaaaaaaaaaaaaaaaaaaaaaaaaaaaaaagcatatgactaaaaaaaaaaaaaaaaaaaaaaaaaaaaaaaaaaaaaaaaaaaaaaaaaaaaaaaaaaaaaaaaaaaaaaaaaagaagagcaagctt

SEQ ID NO: 351 - protein, 9 aa, synthetic construct
  REGION 1..9: note = Description of sequence: mRNA T cell epitope;
KSYELQTPF

SEQ ID NO: 352 - protein, 9 aa, synthetic construct
  REGION 1..9: note = Description of sequence: mRNA T cell epitope;
YELQTPFEI

SEQ ID NO: 353 - protein, 9 aa, synthetic construct
  REGION 1..9: note = Description of sequence: mRNA T cell epitope;
NYMPYFFTL

SEQ ID NO: 354 - protein, 9 aa, synthetic construct
  REGION 1..9: note = Description of sequence: mRNA T cell epitope;
MPYFFTLLL

SEQ ID NO: 355 - protein, 9 aa, synthetic construct
  REGION 1..9: note = Description of sequence: mRNA T cell epitope;
FLLNKEMYL

SEQ ID NO: 356 - protein, 9 aa, synthetic construct
  REGION 1..9: note = Description of sequence: mRNA T cell epitope;
SAFAMMFVK

SEQ ID NO: 357 - protein, 9 aa, synthetic construct
  REGION 1..9: note = Description of sequence: mRNA T cell epitope;
MTNRQFHQK

SEQ ID NO: 358 - protein, 9 aa, synthetic construct
  REGION 1..9: note = Description of sequence: mRNA T cell epitope;
RQFHQKLLK

SEQ ID NO: 359 - protein, 9 aa, synthetic construct
  REGION 1..9: note = Description of sequence: mRNA T cell epitope;
SMMGFKMNY

SEQ ID NO: 360 - protein, 15 aa, synthetic construct
  REGION 1..15: note = Description of sequence: mRNA T cell epitope; MHC 2
TYRRLISMMGFKMNY

SEQ ID NO: 361 - protein, 9 aa, synthetic construct
  REGION 1..9: note = Description of sequence: mRNA T cell epitope;
LPVNVAFEL

SEQ ID NO: 362 - protein, 9 aa, synthetic construct
  REGION 1..9: note = Description of sequence: mRNA T cell epitope;
HSYFTSDYY

SEQ ID NO: 363 - protein, 9 aa, synthetic construct
  REGION 1..9: note = Description of sequence: mRNA T cell epitope;
LWLLWPVTL

SEQ ID NO: 364 - protein, 15 aa, synthetic construct
  REGION 1..15: note = Description of sequence: mRNA T cell epitope;
ASFRLFARTRSMWSF

SEQ ID NO: 365 - protein, 9 aa, synthetic construct
  REGION 1..9: note = Description of sequence: mRNA T cell epitope;
SFRLFARTR

SEQ ID NO: 366 - protein, 9 aa, synthetic construct
  REGION 1..9: note = Description of sequence: mRNA T cell epitope;
SELVIGAVI

SEQ ID NO: 367 - protein, 9 aa, synthetic construct
  REGION 1..9: note = Description of sequence: mRNA T cell epitope;
LPKEITVAT

SEQ ID NO: 368 - protein, 15 aa, synthetic construct
  REGION 1..15: note = Description of sequence: mRNA T cell epitope; MHC 2
SYFIASFRLFARTRS

SEQ ID NO: 369 - protein, 15 aa, synthetic construct
  REGION 1..15: note = Description of sequence: mRNA T cell epitope; MHC 2
ASFRLFARTRSMWSF

SEQ ID NO: 370 - protein, 9 aa, synthetic construct
  REGION 1..9: note = Description of sequence: mRNA T cell epitope;
NTASWFTAL

SEQ ID NO: 371 - protein, 9 aa, synthetic construct
  REGION 1..9: note = Description of sequence: mRNA T cell epitope;
FTALTQHGK

SEQ ID NO: 372 - protein, 9 aa, synthetic construct
  REGION 1..9: note = Description of sequence: mRNA T cell epitope;
MARKTLNSL

SEQ ID NO: 373 - protein, 9 aa, synthetic construct
  REGION 1..9: note = Description of sequence: mRNA T cell epitope;
LSPRWYFYY

SEQ ID NO: 374 - protein, 15 aa, synthetic construct
  REGION 1..15: note = Description of sequence: mRNA T cell epitope; MHC 2
LSPRWYFYYLGTGPE

SEQ ID NO: 375 - protein, 10 aa, synthetic construct
  REGION 1..10: note = Description of sequence: mRNA T cell epitope;
AQFAPSASAF

SEQ ID NO: 376 - protein, 10 aa, synthetic construct
  REGION 1..10: note = Description of sequence: mRNA T cell epitope;
LLNKHIDAYK

SEQ ID NO: 377 - skipped

SEQ ID NO: 378 - protein, 31 aa, synthetic construct
  REGION 1..31: note = Description of sequence: mRNA T cell epitope;
NPLLYDANYFLCWHTNCYDYCIPYNSVTSSI

SEQ ID NO: 379 - protein, 56 aa, synthetic construct
  REGION 1..56: note = Description of sequence: mRNA T cell epitope;
RLFARTRSMWSFNPETNILLNVPLHGTILTRPLLESELVIGAVILRGHLRIAGHHL

SEQ ID NO: 380 - protein, 11 aa, synthetic construct
  REGION 1..11: note = Description of sequence: mRNA T cell epitope;
NSSPDDQIGYY

SEQ ID NO: 381 - protein, 42 aa, synthetic construct
  REGION 1..42: note = Description of sequence: mRNA T cell epitope;
RRGPEQTQGNFGDQELIRQGTDYKHWPQIAQFAPSASAFFGM

SEQ ID NO: 382 - skipped

SEQ ID NO: 383 - protein, 9 aa, synthetic construct
  REGION 1..9: note = Description of sequence: mRNA T cell epitope;
SALNHTKKW

SEQ ID NO: 384 - protein, 10 aa, synthetic construct
  REGION 1..10: note = Description of sequence: mRNA T cell epitope;
QVNGLTSIKW

SEQ ID NO: 385 - protein, 10 aa, synthetic construct
  REGION 1..10: note = Description of sequence: mRNA T cell epitope;
SIKWADNNCY

SEQ ID NO: 386 - protein, 9 aa, synthetic construct
  REGION 1..9: note = Description of sequence: mRNA T cell epitope;
YLATALLTL

SEQ ID NO: 387 - protein, 9 aa, synthetic construct
  REGION 1..9: note = Description of sequence: mRNA T cell epitope;
TTLPVNVAF

SEQ ID NO: 388 - protein, 24 aa, synthetic construct
  REGION 1..24: note = Description of sequence: mRNA T cell epitope;
GFLFLTWICLLQFAYANRNRFLYI

SEQ ID NO: 389 - protein, 25 aa, synthetic construct
  REGION 1..25: note = Description of sequence: mRNA T cell epitope;
RNRFLYIIKLIFLWLLWPVTLACFV

SEQ ID NO: 390 - protein, 19 aa, synthetic construct
  REGION 1..19: note = Description of sequence: mRNA T cell epitope;
LKKLLEQWNLVIGFLFLTW

SEQ ID NO: 391 - protein, 20 aa, synthetic construct
  REGION 1..20: note = Description of sequence: mRNA T cell epitope;
LWPVTLACFVLAAVYRINWI

SEQ ID NO: 392 - protein, 28 aa, synthetic construct
  REGION 1..28: note = Description of sequence: mRNA T cell epitope;
LVGLMWLSYFIASFRLFARTRSMWSFNP

SEQ ID NO: 393 - protein, 21 aa, synthetic construct
  REGION 1..21: note = Description of sequence: mRNA T cell epitope;
MWSFNPETNILLNVPLHGTIL

SEQ ID NO: 394 - protein, 21 aa, synthetic construct
  REGION 1..21: note = Description of sequence: mRNA T cell epitope;
IGAVILRGHLRIAGHHLGRCD

SEQ ID NO: 395 - protein, 17 aa, synthetic construct
  REGION 1..17: note = Description of sequence: mRNA T cell epitope;
PKEITVATSRTLSYYKL

SEQ ID NO: 396 - protein, 18 aa, synthetic construct
  REGION 1..18: note = Description of sequence: mRNA T cell epitope;
TLSYYKLGASQRVAGDSG

SEQ ID NO: 397 - skipped

SEQ ID NO: 398 - protein, 10 aa, synthetic construct
  REGION 1..10: note = Description of sequence: mRNA T cell epitope;
TTDPSFLGRY

SEQ ID NO: 399 - protein, 10 aa, synthetic construct
  REGION 1..10: note = Description of sequence: mRNA T cell epitope;
IEYPIIGDEL

SEQ ID NO: 400 - protein, 9 aa, synthetic construct
  REGION 1..9: note = Description of sequence: mRNA T cell epitope;
VYFLQSINF

SEQ ID NO: 401 - protein, 9 aa, synthetic construct
  REGION 1..9: note = Description of sequence: mRNA T cell epitope;
NRFLYIIKL

SEQ ID NO: 402 - protein, 10 aa, synthetic construct
  REGION 1..10: note = Description of sequence: mRNA T cell epitope;
SELVIGAVIL

SEQ ID NO: 403 - protein, 15 aa, synthetic construct
  REGION 1..15: note = Description of sequence: mRNA T cell epitope; MHC 2
RWYFYYLGTGPEAGL

SEQ ID NO: 404 - protein, 10 aa, synthetic construct
  REGION 1..10: note = Description of sequence: mRNA T cell epitope;
MEVTPSGTWL

SEQ ID NO: 405 - protein, 14 aa, synthetic construct
  REGION 1..14: note = Description of sequence: mRNA T cell epitope; MHC 2
ASWFTALTQHGKED

SEQ ID NO: 406 - protein, 15 aa, synthetic construct
  REGION 1..15: note = Description of sequence: mRNA T cell epitope; MHC 2
IGYYRRATRRIRGGD

SEQ ID NO: 407 - protein, 15 aa, synthetic construct
  REGION 1..15: note = Description of sequence: mRNA T cell epitope; MHC 2
GTWLTYTGAIKLDDK

SEQ ID NO: 408 - skipped

SEQ ID NO: 409 - protein, 9 aa, synthetic construct
  REGION 1..9: note = Description of sequence: mRNA T cell epitope;
RTAPHGHVM

SEQ ID NO: 410 - protein, 9 aa, synthetic construct
  REGION 1..9: note = Description of sequence: mRNA T cell epitope;
KSYELQTPF

SEQ ID NO: 411 - protein, 9 aa, synthetic construct
  REGION 1..9: note = Description of sequence: mRNA T cell epitope;
KLAKKFDTF

SEQ ID NO: 412 - protein, 9 aa, synthetic construct
  REGION 1..9: note = Description of sequence: mRNA T cell epitope;
FLGRYMSAL

SEQ ID NO: 413 - protein, 9 aa, synthetic construct
  REGION 1..9: note = Description of sequence: mRNA T cell epitope;
CTNYMPYFF

SEQ ID NO: 414 - protein, 9 aa, synthetic construct
  REGION 1..9: note = Description of sequence: mRNA T cell epitope;
YMPYFFTLL

SEQ ID NO: 415 - protein, 9 aa, synthetic construct
  REGION 1..9: note = Description of sequence: mRNA T cell epitope;
MPYFFTLLL

SEQ ID NO: 416 - protein, 9 aa, synthetic construct
  REGION 1..9: note = Description of sequence: mRNA T cell epitope;
FLLNKEMYL

SEQ ID NO: 417 - protein, 9 aa, synthetic construct
  REGION 1..9: note = Description of sequence: mRNA T cell epitope;
TQYNRYLAL

SEQ ID NO: 418 - protein, 9 aa, synthetic construct
  REGION 1..9: note = Description of sequence: mRNA T cell epitope;
AMSAFAMMF

SEQ ID NO: 419 - protein, 9 aa, synthetic construct
  REGION 1..9: note = Description of sequence: mRNA T cell epitope;
RQFHQKLLK

SEQ ID NO: 420 - protein, 9 aa, synthetic construct
  REGION 1..9: note = Description of sequence: mRNA T cell epitope;
SMMGFKMNY

SEQ ID NO: 421 - protein, 9 aa, synthetic construct
  REGION 1..9: note = Description of sequence: mRNA T cell epitope;
KMNYQVNGY

SEQ ID NO: 422 - protein, 9 aa, synthetic construct
  REGION 1..9: note = Description of sequence: mRNA T cell epitope;
YVMHANYIF

SEQ ID NO: 423 - protein, 9 aa, synthetic construct
  REGION 1..9: note = Description of sequence: mRNA T cell epitope;
VMHANYIFW

SEQ ID NO: 424 - protein, 9 aa, synthetic construct
  REGION 1..9: note = Description of sequence: mRNA T cell epitope;
IQLSSYSLF

SEQ ID NO: 425 - protein, 9 aa, synthetic construct
  REGION 1..9: note = Description of sequence: mRNA T cell epitope;
APFLYLYAL

SEQ ID NO: 426 - protein, 9 aa, synthetic construct
  REGION 1..9: note = Description of sequence: mRNA T cell epitope;
YANRNRFLY

SEQ ID NO: 427 - protein, 9 aa, synthetic construct
  REGION 1..9: note = Description of sequence: mRNA T cell epitope;
YFIASFRLF

SEQ ID NO: 428 - protein, 9 aa, synthetic construct
  REGION 1..9: note = Description of sequence: mRNA T cell epitope;
RLFARTRSM

SEQ ID NO: 429 - protein, 9 aa, synthetic construct
  REGION 1..9: note = Description of sequence: mRNA T cell epitope;
ATSRTLSYY

SEQ ID NO: 430 - protein, 9 aa, synthetic construct
  REGION 1..9: note = Description of sequence: mRNA T cell epitope;
ITLATCELY

SEQ ID NO: 431 - protein, 9 aa, synthetic construct
  REGION 1..9: note = Description of sequence: mRNA T cell epitope;
FPRGQGVPI

SEQ ID NO: 432 - protein, 9 aa, synthetic construct
  REGION 1..9: note = Description of sequence: mRNA T cell epitope;
LSPRWYFYY

SEQ ID NO: 433 - protein, 9 aa, synthetic construct
  REGION 1..9: note = Description of sequence: mRNA T cell epitope;
SPRWYFYYL

SEQ ID NO: 434 - protein, 15 aa, synthetic construct
  REGION 1..15: note = Description of sequence: mRNA T cell epitope;
QPYVFIKRSDARTAP

SEQ ID NO: 435 - protein, 15 aa, synthetic construct
  REGION 1..15: note = Description of sequence: mRNA T cell epitope;
QIDGYVMHANYIFWR

SEQ ID NO: 436 - protein, 16 aa, synthetic construct
  REGION 1..16: note = Description of sequence: mRNA T cell epitope;
YFLCWHTNCYDYCIPY

SEQ ID NO: 437 - protein, 18 aa, synthetic construct
  REGION 1..18: note = Description of sequence: mRNA T cell epitope;
KDCVVLHSYFTSDYYQLY

SEQ ID NO: 438 - protein, 20 aa, synthetic construct
  REGION 1..20: note = Description of sequence: mRNA T cell epitope;
YFTSDYYQLYSTQLSTDTGV

SEQ ID NO: 439 - protein, 20 aa, synthetic construct
  REGION 1..20: note = Description of sequence: mRNA T cell epitope;
GVEHVTFFIYNKIVDEPEEH

SEQ ID NO: 440 - protein, 18 aa, synthetic construct
  REGION 1..18: note = Description of sequence: mRNA T cell epitope;
LRIAGHHLGRCDIKDLPK

SEQ ID NO: 441 - protein, 18 aa, synthetic construct
  REGION 1..18: note = Description of sequence: mRNA T cell epitope;
GAVILRGHLRIAGHHLGR

SEQ ID NO: 442 - protein, 17 aa, synthetic construct
  REGION 1..17: note = Description of sequence: mRNA T cell epitope;
TSRTLSYYKLGASQRVA

SEQ ID NO: 443 - protein, 18 aa, synthetic construct
  REGION 1..18: note = Description of sequence: mRNA T cell epitope;
IGNYKLNTDHSSSSDNIA

SEQ ID NO: 444 - protein, 17 aa, synthetic construct
  REGION 1..17: note = Description of sequence: mRNA T cell epitope;
PKEITVATSRTLSYYKL

SEQ ID NO: 445 - protein, 17 aa, synthetic construct
  REGION 1..17: note = Description of sequence: mRNA T cell epitope;
LITLATCELYHYQECVR

SEQ ID NO: 446 - protein, 14 aa, synthetic construct
  REGION 1..14: note = Description of sequence: mRNA T cell epitope;
DQIGYYRRATRRIR

SEQ ID NO: 447 - protein, 18 aa, synthetic construct
  REGION 1..18: note = Description of sequence: mRNA T cell epitope;
LSPRWYFYYLGTGPEAGL

SEQ ID NO: 448 - protein, 18 aa, synthetic construct
  REGION 1..18: note = Description of sequence: mRNA T cell epitope;
AFFGMSRIGMEVTPSGTW

SEQ ID NO: 449 - protein, 18 aa, synthetic construct
  REGION 1..18: note = Description of sequence: mRNA T cell epitope;
GMEVTPSGTWLTYTGAIK

SEQ ID NO: 450 - protein, 18 aa, synthetic construct
  REGION 1..18: note = Description of sequence: mRNA T cell epitope;
LLNKHIDAYKTFPPTEPK

SEQ ID NO: 451 - protein, 18 aa, synthetic construct
  REGION 1..18: note = Description of sequence: mRNA T cell epitope; MHC 2
PNFKDQVILLNKHIDAYK

SEQ ID NO: 452 - protein, 15 aa, synthetic construct
  REGION 1..15: note = Description of sequence: T-cell epitope: ARV-HSV-mRNA-3
QASGPHETITALVGA

SEQ ID NO: 453 - protein, 17 aa, synthetic construct
  REGION 1..17: note = Description of sequence: T-cell epitope: ARV-HSV-mRNA-3
ARHASPFERVRCLLLRS

SEQ ID NO: 454 - protein, 15 aa, synthetic construct
  REGION 1..15: note = Description of sequence: T-cell epitope: ARV-HSV-mRNA-3
EGRKSRRPLTTFGSG

SEQ ID NO: 455 - protein, 15 aa, synthetic construct
  REGION 1..15: note = Description of sequence: T-cell epitope: ARV-HSV-mRNA-3
AAAPAWSRRTLLPEH

SEQ ID NO: 456 - protein, 15 aa, synthetic construct
  REGION 1..15: note = Description of sequence: T-cell epitope: ARV-HSV-mRNA-3
HNLFLWEDQTLLRAT

SEQ ID NO: 457 - protein, 19 aa, synthetic construct
  REGION 1..19: note = Description of sequence: T-cell epitope: ARV-HSV-mRNA-3
RGAFEDRSYPAVFYLLQAA

SEQ ID NO: 458 - protein, 20 aa, synthetic construct
  REGION 1..20: note = Description of sequence: T-cell epitope: ARV-HSV-mRNA-3
KNACPLLIFDRTRKFVLACP

SEQ ID NO: 459 - protein, 19 aa, synthetic construct
  REGION 1..19: note = Description of sequence: T-cell epitope: ARV-HSV-mRNA-3
YADRLDNRLQLGMLIPGAV

SEQ ID NO: 460 - protein, 19 aa, synthetic construct
  REGION 1..19: note = Description of sequence: T-cell epitope: ARV-HSV-mRNA-3
KRFGGHYMESVFQMYTRIA

SEQ ID NO: 461 - protein, 19 aa, synthetic construct
  REGION 1..19: note = Description of sequence: T-cell epitope: ARV-HSV-mRNA-3
ILGILVHLRIRTREASFEE

SEQ ID NO: 462 - protein, 19 aa, synthetic construct
  REGION 1..19: note = Description of sequence: T-cell epitope: ARV-HSV-mRNA-3
ETHFTQYLIYDASPLKGLS

SEQ ID NO: 463 - protein, 19 aa, synthetic construct
  REGION 1..19: note = Description of sequence: T-cell epitope: ARV-HSV-mRNA-3
AMKTSNALCVRGARPFSHF

SEQ ID NO: 464 - protein, 19 aa, synthetic construct
  REGION 1..19: note = Description of sequence: T-cell epitope: ARV-HSV-mRNA-3
PALMLEYFCRCAREESKRV

SEQ ID NO: 465 - protein, 19 aa, synthetic construct
  REGION 1..19: note = Description of sequence: T-cell epitope: ARV-HSV-mRNA-3
DTSMSLADFHGEEFEKLYE

SEQ ID NO: 466 - protein, 19 aa, synthetic construct
  REGION 1..19: note = Description of sequence: T-cell epitope: ARV-HSV-mRNA-3
NAWRQRLAHGRVRWVAECQ

SEQ ID NO: 467 - protein, 16 aa, synthetic construct
  REGION 1..16: note = Description of sequence: T-cell epitope: ARV-HSV-mRNA-3
TQYLIYDASPLKGLSL

SEQ ID NO: 468 - protein, 16 aa, synthetic construct
  REGION 1..16: note = Description of sequence: T-cell epitope: ARV-HSV-mRNA-3
TRMAEYDRVHIYYNHR

SEQ ID NO: 469 - protein, 15 aa, synthetic construct
  REGION 1..15: note = Description of sequence: T-cell epitope: ARV-HSV-mRNA-3
ISNQALLRMACEVRQ

SEQ ID NO: 470 - protein, 16 aa, synthetic construct
  REGION 1..16: note = Description of sequence: T-cell epitope: ARV-HSV-mRNA-3
GNWTGAPDVSALGAQG

SEQ ID NO: 471 - protein, 15 aa, synthetic construct
  REGION 1..15: note = Description of sequence: T-cell epitope: ARV-HSV-mRNA-2
ITQFILEHRARASCK

SEQ ID NO: 472 - protein, 15 aa, synthetic construct
  REGION 1..15: note = Description of sequence: T-cell epitope: ARV-HSV-mRNA-2
LPRFIPENQRTVALY

SEQ ID NO: 473 - protein, 15 aa, synthetic construct
  REGION 1..15: note = Description of sequence: T-cell epitope: ARV-HSV-mRNA-2
YTSTLLPPELSDTTN

SEQ ID NO: 474 - protein, 15 aa, synthetic construct
  REGION 1..15: note = Description of sequence: T-cell epitope: ARV-HSV-mRNA-2
DSGLLDYTEVQRRNQ

SEQ ID NO: 475 - protein, 12 aa, synthetic construct
  REGION 1..12: note = Description of sequence: T-cell epitope: ARV-HSV-mRNA-2
AALLVVAVGLRV

SEQ ID NO: 476 - protein, 20 aa, synthetic construct
  REGION 1..20: note = Description of sequence: T-cell epitope: ARV-HSV-mRNA-2
AALLVVAVGLRVVCAKYALA

SEQ ID NO: 477 - protein, 12 aa, synthetic construct
  REGION 1..12: note = Description of sequence: T-cell epitope: ARV-HSV-mRNA-2
AAPANPGLIIGA

SEQ ID NO: 478 - protein, 12 aa, synthetic construct
  REGION 1..12: note = Description of sequence: T-cell epitope: ARV-HSV-mRNA-2
ALLVVAVGLRVV

SEQ ID NO: 479 - protein, 12 aa, synthetic construct
  REGION 1..12: note = Description of sequence: T-cell epitope: ARV-HSV-mRNA-2
ANPGLIIGALAG

SEQ ID NO: 480 - protein, 12 aa, synthetic construct
  REGION 1..12: note = Description of sequence: T-cell epitope: ARV-HSV-mRNA-2
APAAPANPGLII

SEQ ID NO: 481 - protein, 12 aa, synthetic construct
  REGION 1..12: note = Description of sequence: T-cell epitope: ARV-HSV-mRNA-2
APANPGLIIGAL

SEQ ID NO: 482 - protein, 12 aa, synthetic construct
  REGION 1..12: note = Description of sequence: T-cell epitope: ARV-HSV-mRNA-2
AVGLRVVCAKYA

SEQ ID NO: 483 - protein, 12 aa, synthetic construct
  REGION 1..12: note = Description of sequence: T-cell epitope: ARV-HSV-mRNA-2
AYQQGVTVDSIG

SEQ ID NO: 484 - protein, 20 aa, synthetic construct
  REGION 1..20: note = Description of sequence: T-cell epitope: ARV-HSV-mRNA-2
CRSVLLHAPSEAPQIVRGAS

SEQ ID NO: 485 - protein, 20 aa, synthetic construct
  REGION 1..20: note = Description of sequence: T-cell epitope: ARV-HSV-mRNA-2
DEARKHTYNLTIAWYRMGDN

SEQ ID NO: 486 - protein, 12 aa, synthetic construct
  REGION 1..12: note = Description of sequence: T-cell epitope: ARV-HSV-mRNA-2
DPEDSALLEDPA

SEQ ID NO: 487 - protein, 20 aa, synthetic construct
  REGION 1..20: note = Description of sequence: T-cell epitope: ARV-HSV-mRNA-2
DPSLKMADPNRFRGKNLPVL

SEQ ID NO: 488 - protein, 20 aa, synthetic construct
  REGION 1..20: note = Description of sequence: T-cell epitope: ARV-HSV-mRNA-2
EAPQIVRGASDEARKHTYNL

SEQ ID NO: 489 - protein, 12 aa, synthetic construct
  REGION 1..12: note = Description of sequence: T-cell epitope: ARV-HSV-mRNA-2
EDPEDSALLEDP

SEQ ID NO: 490 - protein, 12 aa, synthetic construct
  REGION 1..12: note = Description of sequence: T-cell epitope: ARV-HSV-mRNA-2
EDSALLEDPAGT

SEQ ID NO: 491 - protein, 20 aa, synthetic construct
  REGION 1..20: note = Description of sequence: T-cell epitope: ARV-HSV-mRNA-2
ELSDTTNATQPELVPEDPED

SEQ ID NO: 492 - protein, 12 aa, synthetic construct
  REGION 1..12: note = Description of sequence: T-cell epitope: ARV-HSV-mRNA-2
ELVPEDPEDSAL

SEQ ID NO: 493 - protein, 20 aa, synthetic construct
  REGION 1..20: note = Description of sequence: T-cell epitope: ARV-HSV-mRNA-2
ENQRTVALYSLKIAGWHGPK

SEQ ID NO: 494 - protein, 12 aa, synthetic construct
  REGION 1..12: note = Description of sequence: T-cell epitope: ARV-HSV-mRNA-2
GLRVVCAKYALA

SEQ ID NO: 495 - protein, 12 aa, synthetic construct
  REGION 1..12: note = Description of sequence: T-cell epitope: ARV-HSV-mRNA-2
GVTVDSIGMLPR

SEQ ID NO: 496 - protein, 12 aa, synthetic construct
  REGION 1..12: note = Description of sequence: T-cell epitope: ARV-HSV-mRNA-2
HAPAAPANPGLI

SEQ ID NO: 497 - protein, 20 aa, synthetic construct
  REGION 1..20: note = Description of sequence: T-cell epitope: ARV-HSV-mRNA-2
HAPAAPANPGLIIGALAGST

SEQ ID NO: 498 - protein, 12 aa, synthetic construct
  REGION 1..12: note = Description of sequence: T-cell epitope: ARV-HSV-mRNA-2
KAYQQGVTVDSI

SEQ ID NO: 499 - protein, 20 aa, synthetic construct
  REGION 1..20: note = Description of sequence: T-cell epitope: ARV-HSV-mRNA-2
KAYQQGVTVDSIGMLPRFTP

SEQ ID NO: 500 - protein, 20 aa, synthetic construct
  REGION 1..20: note = Description of sequence: T-cell epitope: ARV-HSV-mRNA-2
LAALVIGGIAFWVRRRRSVA

SEQ ID NO: 501 - protein, 20 aa, synthetic construct
  REGION 1..20: note = Description of sequence: T-cell epitope: ARV-HSV-mRNA-2
LIIGALAGSTLAALVIGGIA

SEQ ID NO: 502 - protein, 12 aa, synthetic construct
  REGION 1..12: note = Description of sequence: T-cell epitope: ARV-HSV-mRNA-2
LLVVAVGLRVVC

SEQ ID NO: 503 - protein, 12 aa, synthetic construct
  REGION 1..12: note = Description of sequence: T-cell epitope: ARV-HSV-mRNA-2
LVPEDPEDSALL

SEQ ID NO: 504 - protein, 12 aa, synthetic construct
  REGION 1..12: note = Description of sequence: T-cell epitope: ARV-HSV-mRNA-2
LVVAVGLRVVCA

SEQ ID NO: 505 - protein, 20 aa, synthetic construct
  REGION 1..20: note = Description of sequence: T-cell epitope: ARV-HSV-mRNA-2
MGRLTSGVGTAALLVVAVGL

SEQ ID NO: 506 - protein, 12 aa, synthetic construct
  REGION 1..12: note = Description of sequence: T-cell epitope: ARV-HSV-mRNA-2
NPGLIIGALAGS

SEQ ID NO: 507 - protein, 12 aa, synthetic construct
  REGION 1..12: note = Description of sequence: T-cell epitope: ARV-HSV-mRNA-2
PAAPANPGLIIG

SEQ ID NO: 508 - protein, 12 aa, synthetic construct
  REGION 1..12: note = Description of sequence: T-cell epitope: ARV-HSV-mRNA-2
PANPGLIIGALA

SEQ ID NO: 509 - protein, 12 aa, synthetic construct
  REGION 1..12: note = Description of sequence: T-cell epitope: ARV-HSV-mRNA-2
PEDPEDSALLED

SEQ ID NO: 510 - protein, 12 aa, synthetic construct
  REGION 1..12: note = Description of sequence: T-cell epitope: ARV-HSV-mRNA-2
PEDSALLEDPAG

SEQ ID NO: 511 - protein, 12 aa, synthetic construct
  REGION 1..12: note = Description of sequence: T-cell epitope: ARV-HSV-mRNA-2
PELVPEDPEDSA

SEQ ID NO: 512 - protein, 20 aa, synthetic construct
  REGION 1..20: note = Description of sequence: T-cell epitope: ARV-HSV-mRNA-2
PELVPEDPEDSALLEDPAGT

SEQ ID NO: 513 - protein, 12 aa, synthetic construct
  REGION 1..12: note = Description of sequence: T-cell epitope: ARV-HSV-mRNA-2
PGLIIGALAGST

SEQ ID NO: 514 - protein, 12 aa, synthetic construct
  REGION 1..12: note = Description of sequence: T-cell epitope: ARV-HSV-mRNA-2
QGVTVDSIGMLP

SEQ ID NO: 515 - protein, 12 aa, synthetic construct
  REGION 1..12: note = Description of sequence: T-cell epitope: ARV-HSV-mRNA-2
QQGVTVDSIGML

SEQ ID NO: 516 - protein, 20 aa, synthetic construct
  REGION 1..20: note = Description of sequence: T-cell epitope: ARV-HSV-mRNA-2
RASCKYALPLRIPPAACLTS

SEQ ID NO: 517 - protein, 20 aa, synthetic construct
  REGION 1..20: note = Description of sequence: T-cell epitope: ARV-HSV-mRNA-2
RVVCAKYALADPSLKMADPN

SEQ ID NO: 518 - protein, 20 aa, synthetic construct
  REGION 1..20: note = Description of sequence: T-cell epitope: ARV-HSV-mRNA-2
SIGMLPRFTPENQRTVALYS

SEQ ID NO: 519 - protein, 12 aa, synthetic construct
  REGION 1..12: note = Description of sequence: T-cell epitope: ARV-HSV-mRNA-2
TVDSIGMLPRFT

SEQ ID NO: 520 - protein, 12 aa, synthetic construct
  REGION 1..12: note = Description of sequence: T-cell epitope: ARV-HSV-mRNA-2
VAVGLRVVCAKY

SEQ ID NO: 521 - protein, 12 aa, synthetic construct
  REGION 1..12: note = Description of sequence: T-cell epitope: ARV-HSV-mRNA-2
VDSIGMLPRFTP

SEQ ID NO: 522 - protein, 12 aa, synthetic construct
  REGION 1..12: note = Description of sequence: T-cell epitope: ARV-HSV-mRNA-2
VGLRVVCAKYAL

SEQ ID NO: 523 - protein, 12 aa, synthetic construct
  REGION 1..12: note = Description of sequence: T-cell epitope: ARV-HSV-mRNA-2
VPEDPEDSALLE

SEQ ID NO: 524 - protein, 12 aa, synthetic construct
  REGION 1..12: note = Description of sequence: T-cell epitope: ARV-HSV-mRNA-2
VTVDSIGMLPRF

SEQ ID NO: 525 - protein, 12 aa, synthetic construct
  REGION 1..12: note = Description of sequence: T-cell epitope: ARV-HSV-mRNA-2
VVAVGLRVVCAK

SEQ ID NO: 526 - protein, 12 aa, synthetic construct
  REGION 1..12: note = Description of sequence: T-cell epitope: ARV-HSV-mRNA-2
YQQGVTVDSIGM

SEQ ID NO: 527 - protein, 13 aa, synthetic construct
  REGION 1..13: note = Description of sequence: T-cell epitope: ARV-HSV-mRNA-2
NKRVFCAAVGRLA

SEQ ID NO: 528 - protein, 20 aa, synthetic construct
  REGION 1..20: note = Description of sequence: T-cell epitope: ARV-HSV-mRNA-2
IPSIQDVAPHHAPAAPANPG

SEQ ID NO: 529 - protein, 20 aa, synthetic construct
  REGION 1..20: note = Description of sequence: T-cell epitope: ARV-HSV-mRNA-2
LKIAGWHGPKPPYTSTLLPP

SEQ ID NO: 530 - protein, 20 aa, synthetic construct
  REGION 1..20: note = Description of sequence: T-cell epitope: ARV-HSV-mRNA-2
RFRGKNLPVLDQLTDPPGVK

SEQ ID NO: 531 - protein, 15 aa, synthetic construct
  REGION 1..15: note = Description of sequence: T-cell epitope: ARV-HSV-mRNA-2
GTTVNCIVEEVDARS

SEQ ID NO: 532 - protein, 15 aa, synthetic construct
  REGION 1..15: note = Description of sequence: T-cell epitope: ARV-HSV-mRNA-2
HVNDMLGRIAVAWCE

SEQ ID NO: 533 - protein, 15 aa, synthetic construct
  REGION 1..15: note = Description of sequence: T-cell epitope: ARV-HSV-mRNA-2
LDYTEVQRRNQLHDL

SEQ ID NO: 534 - protein, 15 aa, synthetic construct
  REGION 1..15: note = Description of sequence: T-cell epitope: ARV-HSV-mRNA-2
YPYDEFVLATGDFVY

SEQ ID NO: 535 - protein, 12 aa, synthetic construct
  REGION 1..12: note = Description of sequence: T-cell epitope: ARV-HSV-mRNA-2
IAVVFKENIAPY

SEQ ID NO: 536 - protein, 11 aa, synthetic construct
  REGION 1..11: note = Description of sequence: T-cell epitope: ARV-HSV-mRNA-2
YMALVSAMERT

SEQ ID NO: 537 - protein, 15 aa, synthetic construct
  REGION 1..15: note = Description of sequence: T-cell epitope: ARV-HSV-mRNA-2
ADMRIYSEALYHPQL

SEQ ID NO: 538 - protein, 15 aa, synthetic construct
  REGION 1..15: note = Description of sequence: T-cell epitope: ARV-HSV-mRNA-2
ATGDIIYMSPFYGYR

SEQ ID NO: 539 - protein, 14 aa, synthetic construct
  REGION 1..14: note = Description of sequence: T-cell epitope: ARV-HSV-mRNA-2
FVMSPFFGLREGSH

SEQ ID NO: 540 - protein, 1461 aa, synthetic construct
  REGION 1..1461: note = Description of sequence: Sequence of construct FCoV SPIKE; Protein Sequence
MILLILALLSTAKSEDAPHGVTLPYFNTSYDNNKFELNFYNFLQTWDIPPNTETILGGYLPYCGNGVNCGWYNFVYGRPVGSNGKYAYINTQNLNIPNVHGVYFDVREHNSDGVWDTRDRVGLLIAIHGSAHYSLLMVLQDSVEENQPHFAVKICHWKPGNISSYHQFNVEFGDGGQCVFNKRFSLDTVLTTNDFYGFQWTDTYVDIYLGGTITKVWIANDWSVVESSISYHWNQLNYGYYIQFVNRTTFYIYNNTGGSNYTHLRLSECHGAYCAGYAKNVFVPIDGKIPESFSFSNWFLLSDKSTLVQGRILSKQPVFVQCLRPVPLWSNNSAVVYFKNDAFCHNVTTDVLRFNLNFSDTDIYIESTKDDQLHFTFEDNTTASIACYSSANVTDFQPANNSVSHIPFGKTAYFCFATFSHSVVSRQFLGILPPIVREFAFGRDGSIFVNGYKYFSLPPIKSVNFSISSVEQYGFWTIAYTNYTDVMVDVNGTGITRLFYCDSPLNRIKCQQLKYELPDGFYSASMLVKKDLPKTFVTMPQFYNWMNVTLHVVLNDTEKKPDTILAKAPELASLADIHFEVAQSNGSVTNVTSICVQTRQLALFYKYTSLQGLYTYSNLVELQNYDCPFSPQQFNNYLQFETLCFDVNPAVAGCKWSLVHDTRWRTQFATITVSYKEGSMITTMPSSQLGFQDISVLVKDECTDYNIYGFQGTGVIRNTTSRLVAGLYYTSISGDLLAFKNSTTGEIFTVVPCDLTAQAAVINDEIVGVITSVNQTDLFEFVNHTSTRRSRIAAVPQAATTYTMPQFYYITKWNNDTSTNCTSVITYSSFAICNTGEIKYVNVTHVEVVVVKPVSTGNITIPKNFTVAVQAEYIQIQVKPVAVDCAKYVCNGNRHCLNLLTQYTSACQTIENALNLGARLESLMLNDMITVSYRSLELATVEKFNTTVVGGEKLGGFYFDGLRALLPPTIGKRSAVEDLLFNKVVTSGLGTVDDDYKKCSSGTDVADLVCAQYYNGIMVLPGVVDGNKMAMYTASLIGGMALGSITSAVAVPFAMQVQARLNYVALQTDVLQENQKILANAFNNAIGNITLALGKVSNAITTTSYGFNSMALALTKIQSVVNQQGEALSQLTSQLQKNFQAISSSIAEIYNRLEKVEADAQVDRLITGRLAALNAYVSQTLTQYAEVKASRQLAMEKVNECVKSQSDRYGFCGNGTHLFSLVNSAPDGLLFFHTVLLPTEWEEVTAWSGICVNDTYAYVLKDFEYSIFSYNNTYMVTPRNMFQPRKPHMSDFVQITSCEVTFLNTTYTTFQEIVIDYIDINKTISDMLEQYNPNHTIPDLDLQLEIFNQTKLNLTAEIDQLEQRADNLTTIAHELQQYIDNLNKTLVDLEWLNRIETYVKWPWYVWLLIGLVVVFCIPLLLFCCLSTGCCGCFGCLGSCCNSFCSRRQFESYEPIEKVHIH

SEQ ID NO: 541 - DNA, 4386 bp, synthetic construct
  misc_feature 1..4386: note = Description of sequence: Sequence of construct FCoV SPIKE; DNA Sequence
  source 1..4386: mol_type = other DNA
atgatattgctaatactagctctacttagcactgctaagtctgaagatgctcctcatggtgtcaccttaccgtactttaacacttcctatgacaataacaagtttgaacttaatttctataatttccttcaaacttgggatataccaccaaatacggaaactattcttggtggttacctgccatattgtggaaacggtgtaaattgtgggtggtataattttgtttatggtcgacctgtgggatctaatggtaagtatgcatacataaacacgcaaaacctgaacatacctaatgtccatggtgtctacttcgatgtgagagaacataattctgatggcgtgtgggacacgcgagatcgcgttggcttattgatagccattcatggctccgcgcattacagtctactaatggttttacaagactcggtggaagagaatcagcctcattttgctgttaaaatctgccattggaaaccaggtaacataagttcctatcatcaatttaatgttgagtttggagacggaggccaatgtgtgtttaacaagagattctcattggacacagtgttgacaactaatgacttttatggcttccagtggactgatacatatgtggatatctatttaggtggcactattactaaagtgtggattgccaatgattggagtgttgttgaatctagtatctcctatcactggaaccagcttaattatggatattacatccaatttgtcaaccgcactaccttttacatctataataatactggtggttcaaattatacccatttgcgactcagcgagtgccacggagcgtattgtgctggttatgctaaaaatgtctttgtgccaattgatggcaaaataccagaaagcttttcttttagtaactggtttctgttatcagacaagtctacattggtgcaaggccgcattcttagcaaacagccagtgtttgtacaatgtcttaggcctgtaccattgtggtctaacaatagtgctgtggtgtattttaaaaatgatgctttctgccacaatgttacgacagatgttttgaggttcaatctaaactttagtgatactgatatctacatagagtcaactaaggatgatcaattgcacttcacatttgaagataatacaactgcctctatagcctgttatagcagtgccaacgttactgatttccagcctgcaaacaatagtgtctctcatattccatttggcaagactgcgtatttctgttttgccactttctctcactctgttgtgagcagacagtttctgggcatactcccaccaattgttcgagagtttgcatttggcagagatggatccatttttgttaatggctataaatattttagtctaccacctatcaagagtgtcaatttttccattagctcagttgagcagtatggattttggaccatagcttacactaactatacagacgtaatggtggatgttaacggcacaggtattactaggttattctattgtgactcaccactcaatagaattaagtgtcaacaattgaagtatgagctaccagacggtttttattctgctagtatgctcgttaaaaaggacctacctaaaacatttgtcaccatgccacagttttacaactggatgaacgtcacgttacatgttgtattaaatgacacagagaaaaaacctgacactattcttgctaaggctcctgagctagcatcacttgcggatatacattttgaagtagctcagtctaatggtagtgtaacgaatgtcactagtatatgtgtccaaacaagacagttggctctattttataagtacaccagcttacaaggtttgtacacttattctaacctagtggagttacaaaattatgactgccctttttcaccacaacagtttaataattatctgcagtttgagactttgtgttttgatgtgaatccagctgttgcaggttgtaagtggtcgttagtccatgacactaggtggcgtacccaattcgccactatcacagtttcttacaaagagggttctatgatcactactatgccaagttcacagttgggttttcaagatatctctgttttggtaaaagacgaatgcactgattacaacatttatggatttcagggcacaggtgttattagaaataccacctctaggttagtggctggtctctattacacatctattagtggcgaccttcttgcttttaaaaatagtactactggggaaattttcactgtagtgccatgtgacttaacagctcaagctgcagttattaatgacgaaatagttggagttataacatccgttaatcaaactgatctgtttgagtttgtaaaccacacatcaactcgaagatcgcgcatagcagcagtgccacaagcggcaactacctatactatgccgcaattttattacataacaaagtggaataatgacacctcgactaattgtacatctgtcattacctattcctcctttgctatttgtaatactggtgaaattaaatatgttaatgttactcatgttgaagttgtagttgttaaacctgtttcaacaggtaacataactatacctaaaaatttcacggttgcagtacaagccgaatacattcagattcaagtaaagcctgttgctgtggattgtgctaagtatgtctgtaatggtaatagacattgccttaacttgttaacacaatacacctcagcttgtcaaacaatagaaaatgccctcaatcttggtgcacgccttgaatctttaatgcttaatgatatgattacagtatcatatcgcagtctagagcttgcaactgttgaaaagtttaacactactgttgtaggtggtgaaaagcttggtggtttctattttgacggtttgagagccttgctaccacctacaattggtaaacggtcagctgttgaagacctattgttcaacaaagtggtgaccagcggtcttggcaccgttgacgatgactataaaaagtgttcttctggcactgatgttgcagatttagtttgtgcccaatattacaatggcataatggttttacctggtgttgtggatggcaataagatggctatgtataccgcatccttaattggcggtatggccttgggttctattacatctgctgtagccgtccctttcgctatgcaagtgcaggcacggctcaattatgttgcactacaaactgatgttttacaggaaaaccagaaaatacttgctaatgctttcaataatgccattggtaacattactttagcgcttggaaaagtctccaatgctattacaaccacatcatatggttttaatagtatggccttggcactgactaaaattcagagtgtggttaaccaacagggtgaggcgttgagtcaacttaccagtcagttacagaaaaatttccaggctattagtagttctattgctgaaatctacaatagactggaaaaagtggaagctgatgctcaagttgaccgtctcatcaccgggagattagcagcacttaatgcttatgtgtctcaaactttaactcaatatgctgaagtcaaggctagtagacaattggcaatggagaaggttaatgagtgcgtgaagtcccagtcggataggtatgggttctgtggaaatggaacacacctattctcacttgtcaattctgcacctgatggtttacttttctttcacacagtgttacttcctacagaatgggaagaggtgacggcatggtcaggaatatgtgttaatgacacatatgcatatgtgttgaaagactttgaatattctatttttagctataacaatacgtatatggtgactcctcgtaatatgtttcaacctagaaaacctcatatgagtgatttcgttcaaattacgagctgtgaagtgacttttcttaacactacatatacgacatttcaggagattgtgattgattatattgatatcaacaagactatctctgatatgcttgaacagtataatcctaatcacacaatacctgatttagatttacagctagaaatctttaaccagacaaagttaaacctcactgcagaaatagaccaattagaacaaagagcagataacctcactaccatcgcacatgaactacagcagtacattgacaaccttaataagacccttgttgaccttgaatggctcaataggattgaaacttatgtaaaatggccgtggtatgtgtggctactaattggactagtagttgtcttttgcataccattgttgctgttttgctgtctgagtactggttgttgtgggtgttttggttgtcttggaagttgttgtaattccttttgtagtagaagacaatttgaaagttacgaacccattgaaaaggttcacattcattaa

SEQ ID NO: 542 - protein, 9 aa, synthetic construct
  REGION 1..9: note = Description of sequence: T cell Epitope sequence
IDGVFWVAK

SEQ ID NO: 543 - protein, 9 aa, synthetic construct
  REGION 1..9: note = Description of sequence: T cell Epitope sequence
VIFLVLLGF

SEQ ID NO: 544 - protein, 9 aa, synthetic construct
  REGION 1..9: note = Description of sequence: T cell Epitope sequence
GLFLNTLSF

SEQ ID NO: 545 - protein, 9 aa, synthetic construct
  REGION 1..9: note = Description of sequence: T cell Epitope sequence
VYSIKMLIM

SEQ ID NO: 546 - protein, 9 aa, synthetic construct
  REGION 1..9: note = Description of sequence: T cell Epitope sequence
YMFVNDLTL

SEQ ID NO: 547 - protein, 9 aa, synthetic construct
  REGION 1..9: note = Description of sequence: T cell Epitope sequence
IVLPARHAY

SEQ ID NO: 548 - protein, 9 aa, synthetic construct
  REGION 1..9: note = Description of sequence: T cell Epitope sequence
SHGSIYVTL

SEQ ID NO: 549 - protein, 9 aa, synthetic construct
  REGION 1..9: note = Description of sequence: T cell Epitope sequence
FIYLAYFWY

SEQ ID NO: 550 - protein, 9 aa, synthetic construct
  REGION 1..9: note = Description of sequence: T cell Epitope sequence
WILKSRLIL

SEQ ID NO: 551 - protein, 9 aa, synthetic construct
  REGION 1..9: note = Description of sequence: T cell Epitope sequence
QYGRPQFSW

SEQ ID NO: 552 - protein, 9 aa, synthetic construct
  REGION 1..9: note = Description of sequence: T cell Epitope sequence
AYAKLQLDI

SEQ ID NO: 553 - protein, 9 aa, synthetic construct
  REGION 1..9: note = Description of sequence: T cell Epitope sequence
TPTGITLTL

SEQ ID NO: 554 - protein, 9 aa, synthetic construct
  REGION 1..9: note = Description of sequence: T cell Epitope sequence
EHPVLTWEL

SEQ ID NO: 555 - protein, 9 aa, synthetic construct
  REGION 1..9: note = Description of sequence: T cell Epitope sequence
PMLIAFGYY

SEQ ID NO: 556 - protein, 9 aa, synthetic construct
  REGION 1..9: note = Description of sequence: T cell Epitope sequence
LIGPMLIAF

SEQ ID NO: 557 - protein, 9 aa, synthetic construct
  REGION 1..9: note = Description of sequence: T cell Epitope sequence
ILACIIACV

SEQ ID NO: 558 - protein, 9 aa, synthetic construct
  REGION 1..9: note = Description of sequence: T cell Epitope sequence
VVLLVCVFL

SEQ ID NO: 559 - protein, 9 aa, synthetic construct
  REGION 1..9: note = Description of sequence: T cell Epitope sequence
ELNSIAFAV

SEQ ID NO: 560 - protein, 9 aa, synthetic construct
  REGION 1..9: note = Description of sequence: T cell Epitope sequence
VVSANIKSF

SEQ ID NO: 561 - protein, 9 aa, synthetic construct
  REGION 1..9: note = Description of sequence: T cell Epitope sequence
TDNLSEHEK

SEQ ID NO: 562 - protein, 9 aa, synthetic construct
  REGION 1..9: note = Description of sequence: T cell Epitope sequence
LFLNTLSFI

SEQ ID NO: 563 - protein, 9 aa, synthetic construct
  REGION 1..9: note = Description of sequence: T cell Epitope sequence
TPRNANKHT

SEQ ID NO: 564 - protein, 9 aa, synthetic construct
  REGION 1..9: note = Description of sequence: T cell Epitope sequence
GKLLVCIGF

SEQ ID NO: 565 - protein, 9 aa, synthetic construct
  REGION 1..9: note = Description of sequence: T cell Epitope sequence
PEELSVTLV

SEQ ID NO: 566 - protein, 9 aa, synthetic construct
  REGION 1..9: note = Description of sequence: T cell Epitope sequence
LFVLFLALY

SEQ ID NO: 567 - protein, 9 aa, synthetic construct
  REGION 1..9: note = Description of sequence: T cell Epitope sequence
LVLLGFSCY

SEQ ID NO: 568 - protein, 9 aa, synthetic construct
  REGION 1..9: note = Description of sequence: T cell Epitope sequence
YQVSRYVMF

SEQ ID NO: 569 - protein, 9 aa, synthetic construct
  REGION 1..9: note = Description of sequence: T cell Epitope sequence
GFSVAGAVL

SEQ ID NO: 570 - protein, 9 aa, synthetic construct
  REGION 1..9: note = Description of sequence: T cell Epitope sequence
GVPDSSLRV

SEQ ID NO: 571 - protein, 9 aa, synthetic construct
  REGION 1..9: note = Description of sequence: T cell Epitope sequence
LLIIVLILF

SEQ ID NO: 572 - protein, 9 aa, synthetic construct
  REGION 1..9: note = Description of sequence: T cell Epitope sequence
FVHDRAAPF

SEQ ID NO: 573 - protein, 9 aa, synthetic construct
  REGION 1..9: note = Description of sequence: T cell Epitope sequence
MLIAFGYYI

SEQ ID NO: 574 - protein, 9 aa, synthetic construct
  REGION 1..9: note = Description of sequence: T cell Epitope sequence
VVLRVIFLV

SEQ ID NO: 575 - protein, 9 aa, synthetic construct
  REGION 1..9: note = Description of sequence: T cell Epitope sequence
YIFSQEAVV

SEQ ID NO: 576 - protein, 9 aa, synthetic construct
  REGION 1..9: note = Description of sequence: T cell Epitope sequence
VLLGFSCYT

SEQ ID NO: 577 - protein, 9 aa, synthetic construct
  REGION 1..9: note = Description of sequence: T cell Epitope sequence
AFAVTLKVL

SEQ ID NO: 578 - protein, 9 aa, synthetic construct
  REGION 1..9: note = Description of sequence: T cell Epitope sequence
LYRRTKSWW

SEQ ID NO: 579 - protein, 9 aa, synthetic construct
  REGION 1..9: note = Description of sequence: T cell Epitope sequence
KVCVGVLMF

SEQ ID NO: 580 - protein, 9 aa, synthetic construct
  REGION 1..9: note = Description of sequence: T cell Epitope sequence
FILYNTTTL

SEQ ID NO: 581 - protein, 9 aa, synthetic construct
  REGION 1..9: note = Description of sequence: T cell Epitope sequence
IALLNVIKL

SEQ ID NO: 582 - protein, 9 aa, synthetic construct
  REGION 1..9: note = Description of sequence: T cell Epitope sequence
YMFVNDLTL

SEQ ID NO: 583 - protein, 9 aa, synthetic construct
  REGION 1..9: note = Description of sequence: T cell Epitope sequence
TLVEAYTDV

SEQ ID NO: 584 - protein, 9 aa, synthetic construct
  REGION 1..9: note = Description of sequence: T cell Epitope sequence
VLAETRLLV

SEQ ID NO: 585 - protein, 9 aa, synthetic construct
  REGION 1..9: note = Description of sequence: T cell Epitope sequence
PIVLALTIF

SEQ ID NO: 586 - protein, 9 aa, synthetic construct
  REGION 1..9: note = Description of sequence: T cell Epitope sequence
MPNFSWILK

SEQ ID NO: 587 - protein, 9 aa, synthetic construct
  REGION 1..9: note = Description of sequence: T cell Epitope sequence
AYFWYVNSR

SEQ ID NO: 588 - protein, 9 aa, synthetic construct
  REGION 1..9: note = Description of sequence: T cell Epitope sequence
KSRERADSK

SEQ ID NO: 589 - protein, 9 aa, synthetic construct
  REGION 1..9: note = Description of sequence: T cell Epitope sequence
VTLYGGINY

SEQ ID NO: 590 - protein, 9 aa, synthetic construct
  REGION 1..9: note = Description of sequence: T cell Epitope sequence
YVMIATPSR

SEQ ID NO: 591 - protein, 9 aa, synthetic construct
  REGION 1..9: note = Description of sequence: T cell Epitope sequence
IYVTLYGGI

SEQ ID NO: 592 - protein, 9 aa, synthetic construct
  REGION 1..9: note = Description of sequence: T cell Epitope sequence
MFPRAFTII

SEQ ID NO: 593 - protein, 9 aa, synthetic construct
  REGION 1..9: note = Description of sequence: T cell Epitope sequence
FWNVCPRDF

SEQ ID NO: 594 - protein, 9 aa, synthetic construct
  REGION 1..9: note = Description of sequence: T cell Epitope sequence
VYDFCAKNW

SEQ ID NO: 595 - protein, 9 aa, synthetic construct
  REGION 1..9: note = Description of sequence: T cell Epitope sequence
FALWMMYFV

SEQ ID NO: 596 - protein, 9 aa, synthetic construct
  REGION 1..9: note = Description of sequence: T cell Epitope sequence
FEFILYNTT

SEQ ID NO: 597 - protein, 9 aa, synthetic construct
  REGION 1..9: note = Description of sequence: T cell Epitope sequence
VEDTIVAVL

SEQ ID NO: 598 - protein, 9 aa, synthetic construct
  REGION 1..9: note = Description of sequence: T cell Epitope sequence
RPQFSWLVY

SEQ ID NO: 599 - protein, 9 aa, synthetic construct
  REGION 1..9: note = Description of sequence: T cell Epitope sequence
TFALWMMYF

SEQ ID NO: 600 - protein, 9 aa, synthetic construct
  REGION 1..9: note = Description of sequence: T cell Epitope sequence
AMQQTGMQC

SEQ ID NO: 601 - protein, 9 aa, synthetic construct
  REGION 1..9: note = Description of sequence: T cell Epitope sequence
VTEQSSRSK

SEQ ID NO: 602 - protein, 9 aa, synthetic construct
  REGION 1..9: note = Description of sequence: T cell Epitope sequence
VYGERYCAM

SEQ ID NO: 603 - protein, 224 aa, synthetic construct
  REGION 1..224: note = Description of sequence: ARV-HSV-gL (HSV-2 glycoprotein L), Protein sequence.
MGFVCLFGLVVMGAWGAWGGSQATEYVLRSVIAKEVGDILRVPCMRTPADDVSWRYEAPSVIDYARIDGIFLRYHCPGLDTFLWDRHAQRAYLVNPFLFAAGFLEDLSHSVFPADTQETTTRRALYKEIRDALGSRKQAVSHAPVRAGCVNFDYSRTRRCVGRRDLRPANTTSTWEPPVSSDDEASSQSKPLATQPPVLALSNAPPRRVSPTRGRRRHTRLRRN

SEQ ID NO: 604 - DNA, 1002 bp, synthetic construct
  misc_feature 1..1002: note = Description of sequence: ARV-HSV-gL (HSV-2 glycoprotein L), DNA sequence.
  source 1..1002: mol_type = other DNA
gaattcggctttaatacgactcactataaggacattagcttctgacacaactgtgttcactagcaacctcaaacagccaccatggggttcgtctgtctgtttgggcttgtcgtaatgggagcctggggggcgtggggaggatcacaggcaaccgaatatgttcttaggagtgttattgccaaagaggtgggggacatactaagagtaccatgcatgcggacccccgcggatgatgtttcatggcgctacgaggccccgagcgttattgactatgccaggatagacggaatatttcttcgctatcactgcccggggcttgacacgttcttgtgggataggcacgcccagagggcatatctggttaatccctttctctttgcggcgggatttttggaggacttgagtcactcagtgtttccggccgacacacaggaaacaacaacgcgcagggccctttataaagagatacgcgatgcgttgggcagtcgaaaacaggccgtcagccacgcacccgtcagggccgggtgtgtaaacttcgactactcaaggacaaggcgctgcgtcgggcgacgcgatttacggccagccaacaccacgtcaacgtgggaaccaccagtgagcagcgacgatgaagcaagctcgcagagcaagcccctcgccacccagccgcccgtcctcgccctttcgaacgcacccccacggcgggtctccccgacgcgaggacggcgccggcatacacgcctccgacgcaattgataacgtacggctggagcctcggtggcctagcttcttgccccttgggcctccccccagcccctcctccccttcctgcacccgtacccccgtggtctttgaataaagtctgagtgggcggcaaaaaaaaaaaaaaaaaaaaaaaaaaaaaagcatatgactaaaaaaaaaaaaaaaaaaaaaaaaaaaaaaaaaaaaaaaaaaaaaaaaaaaaaaaaaaaaaaaaaaaaaaaaaagaagagcaagctt

SEQ ID NO: 605 - protein, 901 aa, synthetic construct
  REGION 1..901: note = Description of sequence: ARV-HSV-gB-WT (HSV-2 glycoprotein B wildtype), Protein sequence
MRGGGLICALVVGALVAAVASAAPAAPRASGGVAATVAANGGPASRPPPVPSPATTRARKRKTKKPPERPEATPPPDANATVAAGHATLRAHLREIKVENADAQFYVCPPPTGATVVQFEQPRRCPTRPEGQNYTEGIAVVFKENIAPYKFKATMYYKDVTVSQVWFGHRYSQFMGIFEDRAPVPFEEVIDKINAKGVCRSTAKYVRNNMETTAFHRDDHETDMELKPAKVATRTSRGWHTTDLKYNPSRVEAFHRYGTTVNCIVEEVDARSVYPYDEFVLATGDFVYMSPFYGYREGSHTEHTSYAADRFKQVDGFYARDLTTKARATSPTTRNLLTTPKFTVAWDWVPKRPAVCTMTKWQEVDEMLRAEYGGSFRFSSDAISTTFTTNLTQYSLSRVDLGDCIGRDAREAIDRMFARKYNATHIKVGQPQYYLATGGFLIAYQPLLSNTLAELYVREYMREQDRKPRNATPAPLREAPSANASVERIKTTSSIEFARLQFTYNHIQRHVNDMLGRIAVAWCELQNHELTLWNEARKLNPNAIASATVGRRVSARMLGDVMAVSTCVPVAPDNVIVQNSMRVSSRPGTCYSRPLVSFRYEDQGPLIEGQLGENNELRLTRDALEPCTVGHRRYFIFGGGYVYFEEYAYSHQLSRADVTTVSTFIDLNITMLEDHEFVPLEVYTRHEIKDSGLLDYTEVQRRNQLHDLRFADIDTVIRADANAAMFAGLCAFFEGMGDLGRAVGKVVMGVVGGVVSAVSGVSSFMSNPFGALAVGLLVLAGLVAAFFAFRYVLQLQRNPMKALYPLTTKELKTSDPGGVGGEGEEGAEGGGFDEAKLAEAREMIRYMALVSAMERTEHKARKKGTSALLSSKVTNMVLRKRNKARYSPLHNEDEAGDEDEL

SEQ ID NO: 606 - DNA, 3030 bp, synthetic construct
  misc_feature 1..3030: note = Description of sequence: ARV-HSV-gB-WT (HSV-2 glycoprotein B wildtype), DNA sequence
  source 1..3030: mol_type = other DNA
gaattcggctttaatacgactcactataaggacattagcttctgacacaactgtgttcactagcaacctcaaacagccaccatgcgcggggggggcttgatatgcgcgctggtcgtgggggcgctggtggccgcggtggcgtcggcggccccggcggccccccgcgccagcggcggcgtggccgcgaccgtcgcggcgaacgggggacccgcctcccggccgccccccgtcccgagccccgcgaccaccagggcccggaagcggaaaaccaaaaagccgcccgagcggcccgaggcgaccccgccccccgacgccaacgcgaccgtcgccgccggccacgccacgctgcgcgcgcacctgcgggaaatcaaggtcgagaacgccgatgcccagttttacgtgtgcccacccccgacaggcgccacggtggtgcagtttgagcagccgcgccgctgcccgacgcgcccggaggggcagaactacacggagggcatcgcggtggtcttcaaggagaacatcgccccgtacaaattcaaggccaccatgtactacaaagacgtgaccgtgtcgcaggtgtggttcggccaccgctactcccagtttatggggatattcgaggaccgcgcccccgtacccttcgaggaggtgatcgacaagataaacgccaagggggtctgccgctccacggccaagtacgtgcggaacaacatggagaccaccgcgtttcaccgggacgaccacgagaccgacatggagctcaagccggcgaaggtcgccacgcgcacgagccgggggtggcacaccaccgacctcaagtacaaccccagccgggtggaggcgttccatcggtacggcacgacggtcaactgcatcgtcgaggaggtggacgcgcggtcggtgtacccgtatgatgagtttgtgctggcgacgggcgactttgtgtacatgtccccgttttacggctaccgggaggggagccacaccgagcacaccagctacgccgccgaccgcttcaagcaggtcgacggcttctacgcgcgcgacctcaccacgaaggcccgggccacgagcccgacgacccgcaacttgctgacgacccccaagtttaccgtggcctgggactgggtgccgaagcgaccggcggtctgcaccatgaccaagtggcaggaggtggacgagatgctccgcgccgagtacggcggctccttccgcttctcctccgacgccatcagcaccaccttcaccaccaacctgacccagtacagcctcagccgcgtcgacctgggcgactgcatcggccgggatgcccgcgaggccatcgaccgcatgtttgcgcgcaagtacaacgccacgcacatcaaggtgggccagccgcagtactacctggccacggggggcttcctcatcgcgtaccagcccctcctcagcaacacgctcgccgagctgtacgtgcgggagtacatgcgggagcaggaccgcaagccccggaatgccacgcccgcgccactgcgggaggcgcccagcgccaacgcgagcgtggagcgcatcaagaccaccagcagcatcgagttcgcccggctgcagtttacgtataaccatatacagcgccacgtgaacgacatgctggggcgcatcgccgtcgcgtggtgcgagctgcagaaccacgagctgacactctggaacgaggcccgcaagctcaaccccaacgccatcgccagcgccaccgtcggccggcgggtgagcgcgcgcatgctcggagacgtcatggccgtctccacgtgcgtgcccgtcgccccggacaacgtgatcgtgcagaacagcatgcgcgtcagcagccggccggggacgtgctacagccgccccctggtcagctttcggtacgaagaccagggcccgctgatcgaggggcagctgggcgagaacaacgagctgcgcctcacccgcgacgcgctcgagccgtgcaccgtgggccaccggcgctacttcatcttcggcgggggctacgtatacttcgaggagtacgcgtactcacaccagctgagtcgcgccgacgtcaccaccgtcagcaccttcatcgacctgaacatcaccatgctggaggaccacgagtttgtgcccctggaggtctacacgcgccacgagatcaaggacagcggcctgctggactacacggaggtccagcgccgcaaccagctgcacgacctgcgctttgccgacatcgacacggtcatccgcgccgacgccaacgccgccatgttcgcggggctgtgcgcgttcttcgaggggatgggggacttggggcgcgcggtcggcaaggtcgtcatgggagtagtggggggcgtggtgagcgccgtcagcggcgtgagctcctttatgtccaaccccttcggggcgcttgccgtggggctactggtcctggccggcctggtcgcggccttcttcgccttccgctacgtcctgcaactgcaacgcaatcccatgaaggccctgtatccgctcaccaccaaggaactcaagacatccgaccccgggggcgtgggcggggagggggaggaaggcgcggaggggggcgggtttgacgaggccaagttggccgaggcccgagaaatgatccgatatatggcattggtgagcgcgatggagcgcacggaacacaaggccagaaagaagggcacgagcgccctgctcagctccaaggtcaccaacatggtactgcgcaagcgcaacaaagccaggtactcaccgctccacaacgaggacgaggccggagacgaagacgagctctgacgtacggctggagcctcggtggcctagcttcttgccccttgggcctccccccagcccctcctccccttcctgcacccgtacccccgtggtctttgaataaagtctgagtgggcggcaaaaaaaaaaaaaaaaaaaaaaaaaaaaaagcatatgactaaaaaaaaaaaaaaaaaaaaaaaaaaaaaaaaaaaaaaaaaaaaaaaaaaaaaaaaaaaaaaaaaaaaaaaaaagaagagcaagctt

SEQ ID NO: 607 - protein, 901 aa, synthetic construct
  REGION 1..901: note = Description of sequence: ARV-HSV-gB (HSV-2 glycoprotein B)
MRGGGLICALVVGALVAAVASAAPAAPRASGGVAATVAANGGPASRPPPVPSPATTRARKRKTKKPPERPEATPPPDANATVAAGHATLRAHLREIKVENADAQFYVCPPPTGATVVQFEQPRRCPTRPEGQNYTEGIAVVFKENIAPYKFKATMYYKDVTVSQVWFGHRYSQFMGIFEDRAPVPFEEVIDKINAKGVCRSTAKYVRNNMETTAFHRDDHETDMELKPAKVATRTSRGWHTTDLKYNPSRVEAFHRYGTTVNCIVEEVDARSVYPYDEFVLATGDFVYMSPFYGYREGSHTEHTSYAADRFKQVDGFYARDLTTKARATSPTTRNLLTTPKFTVAWDWVPKRPAVCTMTKWQEVDEMLRAEYGGSFRFSSDAISTTFTTNLTQYSLSRVDLGDCIGRDAREAIDRMFARKYNATHIKVGQPQYYLATGGFLIAYQPLLSNTLAELYVREYMREQDRKPRNATPAPLREAPSANASVERIKTTSSIEFARLQFTYNHIQRPVNDMLGRIAVAWCELQNHELTLWNEARKLNPNAIASATVGRRVSARMLGDVMAVSTCVPVAPDNVIVQNSMRVSSRPGTCYSRPLVSFRYEDQGPLIEGQLGENNELRLTRDALEPCTVGHRRYFIFGGGYVYFEEYAYSHQLSRADVTTVSTFIDLNITMLEDHEFVPLEVYTRHEIKDSGLLDYTEVQRRNQLHDLRFAAIDTVIRADANAAMFAGLCAFFEGMGDLGRAVGKVVMGVVGGVVSAVSGVSSFMSNPFGALAVGLLVLAGLVAAFFAFRYVLQLQRNPMKALYPLTTKELKTSDPGGVGGEGEEGAEGGGFDEAKLAEAREMIRYMALVSAMERTEHKARKKGTSALLSSKVTNMVLRKRNKARYSPLHNEDEAGDEDEL

SEQ ID NO: 608 - DNA, 3030 bp, synthetic construct
  misc_feature 1..3030: note = Description of sequence: ARV-HSV-gB (HSV-2 glycoprotein B), DNA sequence
  source 1..3030: mol_type = other DNA
gaattcggctttaatacgactcactataaggacattagcttctgacacaactgtgttcactagcaacctcaaacagccaccatgcgcggggggggcttgatatgcgcgctggtcgtgggggcgctggtggccgcggtggcgtcggcggccccggcggccccccgcgccagcggcggcgtggccgcgaccgtcgcggcgaacgggggacccgcctcccggccgccccccgtcccgagccccgcgaccaccagggcccggaagcggaaaaccaaaaagccgcccgagcggcccgaggcgaccccgccccccgacgccaacgcgaccgtcgccgccggccacgccacgctgcgcgcgcacctgcgggaaatcaaggtcgagaacgccgatgcccagttttacgtgtgcccacccccgacaggcgccacggtggtgcagtttgagcagccgcgccgctgcccgacgcgcccggaggggcagaactacacggagggcatcgcggtggtcttcaaggagaacatcgccccgtacaaattcaaggccaccatgtactacaaagacgtgaccgtgtcgcaggtgtggttcggccaccgctactcccagtttatggggatattcgaggaccgcgcccccgtacccttcgaggaggtgatcgacaagataaacgccaagggggtctgccgctccacggccaagtacgtgcggaacaacatggagaccaccgcgtttcaccgggacgaccacgagaccgacatggagctcaagccggcgaaggtcgccacgcgcacgagccgggggtggcacaccaccgacctcaagtacaaccccagccgggtggaggcgttccatcggtacggcacgacggtcaactgcatcgtcgaggaggtggacgcgcggtcggtgtacccgtatgatgagtttgtgctggcgacgggcgactttgtgtacatgtccccgttttacggctaccgggaggggagccacaccgagcacaccagctacgccgccgaccgcttcaagcaggtcgacggcttctacgcgcgcgacctcaccacgaaggcccgggccacgagcccgacgacccgcaacttgctgacgacccccaagtttaccgtggcctgggactgggtgccgaagcgaccggcggtctgcaccatgaccaagtggcaggaggtggacgagatgctccgcgccgagtacggcggctccttccgcttctcctccgacgccatcagcaccaccttcaccaccaacctgacccagtacagcctcagccgcgtcgacctgggcgactgcatcggccgggatgcccgcgaggccatcgaccgcatgtttgcgcgcaagtacaacgccacgcacatcaaggtgggccagccgcagtactacctggccacggggggcttcctcatcgcgtaccagcccctcctcagcaacacgctcgccgagctgtacgtgcgggagtacatgcgggagcaggaccgcaagccccggaatgccacgcccgcgccactgcgggaggcgcccagcgccaacgcgagcgtggagcgcatcaagaccaccagcagcatcgagttcgcccggctgcagtttacgtataaccatatacagcgccccgtgaacgacatgctggggcgcatcgccgtcgcgtggtgcgagctgcagaaccacgagctgacactctggaacgaggcccgcaagctcaaccccaacgccatcgccagcgccaccgtcggccggcgggtgagcgcgcgcatgctcggagacgtcatggccgtctccacgtgcgtgcccgtcgccccggacaacgtgatcgtgcagaacagcatgcgcgtcagcagccggccggggacgtgctacagccgccccctggtcagctttcggtacgaagaccagggcccgctgatcgaggggcagctgggcgagaacaacgagctgcgcctcacccgcgacgcgctcgagccgtgcaccgtgggccaccggcgctacttcatcttcggcgggggctacgtatacttcgaggagtacgcgtactcacaccagctgagtcgcgccgacgtcaccaccgtcagcaccttcatcgacctgaacatcaccatgctggaggaccacgagtttgtgcccctggaggtctacacgcgccacgagatcaaggacagcggcctgctggactacacggaggtccagcgccgcaaccagctgcacgacctgcgctttgccgccatcgacacggtcatccgcgccgacgccaacgccgccatgttcgcggggctgtgcgcgttcttcgaggggatgggggacttggggcgcgcggtcggcaaggtcgtcatgggagtagtggggggcgtggtgagcgccgtcagcggcgtgagctcctttatgtccaaccccttcggggcgcttgccgtggggctactggtcctggccggcctggtcgcggccttcttcgccttccgctacgtcctgcaactgcaacgcaatcccatgaaggccctgtatccgctcaccaccaaggaactcaagacatccgaccccgggggcgtgggcggggagggggaggaaggcgcggaggggggcgggtttgacgaggccaagttggccgaggcccgagaaatgatccgatatatggcattggtgagcgcgatggagcgcacggaacacaaggccagaaagaagggcacgagcgccctgctcagctccaaggtcaccaacatggtactgcgcaagcgcaacaaagccaggtactcaccgctccacaacgaggacgaggccggagacgaagacgagctctgacgtacggctggagcctcggtggcctagcttcttgccccttgggcctccccccagcccctcctccccttcctgcacccgtacccccgtggtctttgaataaagtctgagtgggcggcaaaaaaaaaaaaaaaaaaaaaaaaaaaaaagcatatgactaaaaaaaaaaaaaaaaaaaaaaaaaaaaaaaaaaaaaaaaaaaaaaaaaaaaaaaaaaaaaaaaaaaaaaaaaagaagagcaagctt

SEQ ID NO: 609 - protein, 904 aa, synthetic construct
  REGION 1..904: note = Description of sequence: ARV-HSV-gB-RS (HSV-2 glycoprotein B), Protein sequence
MRGGGLICALVVGALVAAVASAAPAAPAAPRASGGVAATVAANGGPASRPPPVPSPATTKARKRKTKKPPKRPEATPPPDANATVAAGHATLRAHLREIKVENADAQFYVCPPPTGATVVQFEQPRRCPTRPEGQNYTEGIAVVFKENIAPYKFKATMYYKDVTVSQVWFGHRYSQFMGIFEDRAPVPFEEIIDKINAKGVCRSTAKYVRNNMETTAFHRDDHETDMELKPAKFATRTSRGWHTTDLKYNPSRVEAFHRYGTTVNCIVEEVDARSVYPYDEFVLATGDFVYMSPFYGYREGSHTEHTSYAADRFKQVDGFYPRDLTTKARATSPTTRNLLTTPKFTVAWDWVPKRPAVCTMTKWQEVDEMLRAEYGGSFRFSSDAISTTFTTNLTEYSLSRVDLGDCIGRDAREAIDRIFARKYNATHIKVGQPQYYLATGGFLIAYQPLLSNTLAELYVREYMREQDRKPRNATPAPLREAPSANASVERIKTTSSIEFARLQFTYNHIQRHVNDMLGRIAVAWCELQNHELTLWNEARKLNPNAIASATVGRRVSARMLGDVMAVSTCVPVAPDNVIIQNSMRVSSRPGTCYSRPLVSFRYEDQGPLIEGQLGENNELRLTRDALEPCTVGHRRYFIFGGGYVYFEEYAYSHQLSRADVTTVSTFIDLNITMLHDHEFVPLEVYTRHEIKDSGLLPYTEVQRRLQLLDLRFADIDTVINYDPNAAMFAGLYAFFEGMGDVGRAVGKVVMGVVGGVVSAVSGVSSFMSNPFGALAVGLLVLAGLVAAFFAFRYVLRLQRNPMKALYPLTLKELKTSDPGGVGGEGEEGAEGGGFDEAKLAEAREMIRYMALVSAMERTEHKARKKGTSALLSSKVTNMVLRKRNKARYSPLHNEDEAGDEDEL

SEQ ID NO: 610 - DNA, 3034 bp, synthetic construct
  misc_feature 1..3034: note = Description of sequence: ARV-HSV-gB-RS (HSV-2 glycoprotein B), DNA sequence
  source 1..3034: mol_type = other DNA
gaattctaatacgactcactataaggacattagcttctgacacaactgtgttcactagcaacctcaaacagccaccatgcgcggggggggcttgatatgcgcgctggtcgtgggggcgctggtggccgcggtggcgtcggcggccccggcggcccccgcggccccccgcgccagcggcggcgtggccgcgaccgtcgcggcgaacgggggacccgcctcccggccgccccccgtcccgagccccgcgaccaccaaggcccggaagcggaaaaccaaaaagccgcccaagcggcccgaggcgaccccgccccccgacgccaacgcgaccgtcgccgccggccacgccacgctgcgcgcgcacctgcgggaaatcaaggtcgagaacgccgatgcccagttttacgtgtgcccacccccgacaggcgccacggtggtgcagtttgagcagccgcgccgctgcccgacgcgcccggaggggcagaactacacggagggcatcgcggtggtcttcaaggagaacatcgccccgtacaaattcaaggccaccatgtactacaaagacgtgaccgtgtcgcaggtgtggttcggccaccgctactcccagtttatggggatattcgaggaccgcgcccccgtacccttcgaggagatcatcgacaagataaacgccaagggggtctgccgctccacggccaagtacgtgcggaacaacatggagaccaccgcgtttcaccgggacgaccacgagaccgacatggagctcaagccggcgaagttcgccacgcgcacgagccgggggtggcacaccaccgacctcaagtacaaccccagccgggtggaggcgttccatcggtacggcacgacggtcaactgcatcgtcgaggaggtggacgcgcggtcggtgtacccgtatgatgagtttgtgctggcgacgggcgactttgtgtacatgtccccgttttacggctaccgggaggggagccacaccgagcacaccagctacgccgccgaccgcttcaagcaggtcgacggcttctacccgcgcgacctcaccacgaaggcccgggccacgagcccgacgacccgcaacttgctgacgacccccaagtttaccgtggcctgggactgggtgccgaagcgaccggcggtctgcaccatgaccaagtggcaggaggtggacgagatgctccgcgccgagtacggcggctccttccgcttctcctccgacgccatcagcaccaccttcaccaccaacctgaccgagtacagcctcagccgcgtcgacctgggcgactgcatcggccgggatgcccgcgaggccatcgaccgcatctttgcgcgcaagtacaacgccacgcacatcaaggtgggccagccgcagtactacctggccacggggggcttcctcatcgcgtaccagcccctcctcagcaacacgctcgccgagctgtacgtgcgggagtacatgcgggagcaggaccgcaagccccggaatgccacgcccgcgccactgcgggaggcgcccagcgccaacgcgagcgtggagcgcatcaagaccaccagcagcatcgagttcgcccggctgcagtttacgtataaccatatacagcgccacgtgaacgacatgctggggcgcatcgccgtcgcgtggtgcgagctgcagaaccacgagctgacactctggaacgaggcccgcaagctcaaccccaacgccatcgccagcgccaccgtcggccggcgggtgagcgcgcgcatgctcggagacgtcatggccgtctccacgtgcgtgcccgtcgccccggacaacgtgatcatccagaacagcatgcgcgtcagcagccggccggggacgtgctacagccgccccctggtcagctttcggtacgaagaccagggcccgctgatcgaggggcagctgggcgagaacaacgagctgcgcctcacccgcgacgcgctcgagccgtgcaccgtgggccaccggcgctacttcatcttcggcgggggctacgtatacttcgaggagtacgcgtactcacaccagctgagtcgcgccgacgtcaccaccgtcagcaccttcatcgacctgaacatcaccatgctgcacgaccacgagtttgtgcccctggaggtctacacgcgccacgagatcaaggacagcggcctgctgccctacacggaggtccagcgccgcctgcagctgctggacctgcgctttgccgacatcgacacggtcatcaactacgaccccaacgccgccatgttcgcggggctgtacgcgttcttcgaggggatgggggacgtggggcgcgcggtcggcaaggtcgtcatgggagtagtggggggcgtggtgagcgccgtcagcggcgtgagctcctttatgtccaaccccttcggggcgcttgccgtggggctactggtcctggccggcctggtcgcggccttcttcgccttccgctacgtcctgcgcctgcaacgcaatcccatgaaggccctgtatccgctcaccctcaaggaactcaagacatccgaccccgggggcgtgggcggggagggggaggaaggcgcggaggggggcgggtttgacgaggccaagttggccgaggcccgagaaatgatccgatatatggcattggtgagcgcgatggagcgcacggaacacaaggccagaaagaagggcacgagcgccctgctcagctccaaggtcaccaacatggtactgcgcaagcgcaacaaagccaggtactcaccgctccacaacgaggacgaggccggagacgaagacgagctctgacgtacggctggagcctcggtggcctagcttcttgccccttgggcctccccccagcccctcctccccttcctgcacccgtacccccgtggtctttgaataaagtctgagtgggcggcaaaaaaaaaaaaaaaaaaaaaaaaaaaaaagcatatgactaaaaaaaaaaaaaaaaaaaaaaaaaaaaaaaaaaaaaaaaaaaaaaaaaaaaaaaaaaaaaaaaaaaaaaaaaagaagagcaagctt

SEQ ID NO: 611 - protein, 904 aa, synthetic construct
  REGION 1..904: note = Description of sequence: ARV-HSV-gB-RSN (HSV-2 glycoprotein B), Protein sequence
MRGGGLICALVVGALVAAVASAAPAAPAAPRASGGVAATVAANGGPASRPPPVPSPATTKARKRKTKKPPKRPEATPPPDANATVAAGHATLRAHLRELVDENADAQFYVCPPPTGATVVQFEQPRRCPTRPEGQNYTEGIAVVFKENIAPYKFKATMYYKDVTVSQVWFGHRYSQFMGIFEDRAPVPFEEIIDKINAKGVCRSTAKYVRNNMETTAFHRDDHETDMELKPAKFATRTSRGWHTTDLKYNPSRVEAFHRYGTTVNCIVEEVDARSVYPYDEFVLATGDFVYMSPFYGYREGSHTEHTSYAADRFKQVDGFYPRDLTTKARATSPTTRNLLTTPKFTVAWDWVPKRPAVCTMTKWQEVDEMLRAEYGGSFRFSSDAISTTFTTNLTEYSLSRVDLGDCIGRDAREAIDRIFARKYNATHIKVGQPQYYLATGGFLIAYQPLLSNTLAELYVREYMREQDRKPRNATPAPLREAPSANASVERIKTTSSIEFARLQFTYNHIQRHVNDMLGRIAVAWCELQNHELTLWNEARKLNPNAIASATVGRRVSARMLGDVMAVSTCVPVAPDNVIIQNSMRVSSRPGTCYSRPLVSFRYEDQGPLIEGQLGENNELRLTRDALEPCTVGHRRYFIYGKGYVYFEEYAYSHQLSRADVTTVSTFIDLNITMLHDHEFVPLEVYTRHEIKDSGLLPYTEVQRRLQLLDLRFADIDTVINYDPNAAMFAGLYAFFEGMGDVGRAVGKVVMGVVGGVVSAVSGVSSFMSNPFGALAVGLLVLAGLVAAFFAFRYVLRLQRNPMKALYPLTLKELKTSDPGGVGGEGEEGAEGGGFDEAKLAEAREMIRYMALVSAMERTEHKARKKGTSALLSSKVTNMVLRKRNKARYSPLHNEDEAGDEDEL

SEQ ID NO: 612 - DNA, 3034 bp, synthetic construct
  misc_feature 1..3034: note = Description of sequence: ARV-HSV-gB-RSN (HSV-2 glycoprotein B), DNA sequence
  source 1..3034: mol_type = other DNA
gaattctaatacgactcactataaggacattagcttctgacacaactgtgttcactagcaacctcaaacagccaccatgcgcggggggggcttgatatgcgcgctggtcgtgggggcgctggtggccgcggtggcgtcggcggccccggcggcccccgcggccccccgcgccagcggcggcgtggccgcgaccgtcgcggcgaacgggggacccgcctcccggccgccccccgtcccgagccccgcgaccaccaaggcccggaagcggaaaaccaaaaagccgcccaagcggcccgaggcgaccccgccccccgacgccaacgcgaccgtcgccgccggccacgccacgctgcgcgcgcacctgcgggaactggtcgacgagaacgccgatgcccagttttacgtgtgcccacccccgacaggcgccacggtggtgcagtttgagcagccgcgccgctgcccgacgcgcccggaggggcagaactacacggagggcatcgcggtggtcttcaaggagaacatcgccccgtacaaattcaaggccaccatgtactacaaagacgtgaccgtgtcgcaggtgtggttcggccaccgctactcccagtttatggggatattcgaggaccgcgcccccgtacccttcgaggagatcatcgacaagataaacgccaagggggtctgccgctccacggccaagtacgtgcggaacaacatggagaccaccgcgtttcaccgggacgaccacgagaccgacatggagctcaagccggcgaagttcgccacgcgcacgagccgggggtggcacaccaccgacctcaagtacaaccccagccgggtggaggcgttccatcggtacggcacgacggtcaactgcatcgtcgaggaggtggacgcgcggtcggtgtacccgtatgatgagtttgtgctggcgacgggcgactttgtgtacatgtccccgttttacggctaccgggaggggagccacaccgagcacaccagctacgccgccgaccgcttcaagcaggtcgacggcttctacccgcgcgacctcaccacgaaggcccgggccacgagcccgacgacccgcaacttgctgacgacccccaagtttaccgtggcctgggactgggtgccgaagcgaccggcggtctgcaccatgaccaagtggcaggaggtggacgagatgctccgcgccgagtacggcggctccttccgcttctcctccgacgccatcagcaccaccttcaccaccaacctgaccgagtacagcctcagccgcgtcgacctgggcgactgcatcggccgggatgcccgcgaggccatcgaccgcatctttgcgcgcaagtacaacgccacgcacatcaaggtgggccagccgcagtactacctggccacggggggcttcctcatcgcgtaccagcccctcctcagcaacacgctcgccgagctgtacgtgcgggagtacatgcgggagcaggaccgcaagccccggaatgccacgcccgcgccactgcgggaggcgcccagcgccaacgcgagcgtggagcgcatcaagaccaccagcagcatcgagttcgcccggctgcagtttacgtataaccatatacagcgccacgtgaacgacatgctggggcgcatcgccgtcgcgtggtgcgagctgcagaaccacgagctgacactctggaacgaggcccgcaagctcaaccccaacgccatcgccagcgccaccgtcggccggcgggtgagcgcgcgcatgctcggagacgtcatggccgtctccacgtgcgtgcccgtcgccccggacaacgtgatcatccagaacagcatgcgcgtcagcagccggccggggacgtgctacagccgccccctggtcagctttcggtacgaagaccagggcccgctgatcgaggggcagctgggcgagaacaacgagctgcgcctcacccgcgacgcgctcgagccgtgcaccgtgggccaccggcgctacttcatctacggcaagggctacgtatacttcgaggagtacgcgtactcacaccagctgagtcgcgccgacgtcaccaccgtcagcaccttcatcgacctgaacatcaccatgctgcacgaccacgagtttgtgcccctggaggtctacacgcgccacgagatcaaggacagcggcctgctgccctacacggaggtccagcgccgcctgcagctgctggacctgcgctttgccgacatcgacacggtcatcaactacgaccccaacgccgccatgttcgcggggctgtacgcgttcttcgaggggatgggggacgtggggcgcgcggtcggcaaggtcgtcatgggagtagtggggggcgtggtgagcgccgtcagcggcgtgagctcctttatgtccaaccccttcggggcgcttgccgtggggctactggtcctggccggcctggtcgcggccttcttcgccttccgctacgtcctgcgcctgcaacgcaatcccatgaaggccctgtatccgctcaccctcaaggaactcaagacatccgaccccgggggcgtgggcggggagggggaggaaggcgcggaggggggcgggtttgacgaggccaagttggccgaggcccgagaaatgatccgatatatggcattggtgagcgcgatggagcgcacggaacacaaggccagaaagaagggcacgagcgccctgctcagctccaaggtcaccaacatggtactgcgcaagcgcaacaaagccaggtactcaccgctccacaacgaggacgaggccggagacgaagacgagctctgacgtacggctggagcctcggtggcctagcttcttgccccttgggcctccccccagcccctcctccccttcctgcacccgtacccccgtggtctttgaataaagtctgagtgggcggcaaaaaaaaaaaaaaaaaaaaaaaaaaaaaagcatatgactaaaaaaaaaaaaaaaaaaaaaaaaaaaaaaaaaaaaaaaaaaaaaaaaaaaaaaaaaaaaaaaaaaaaaaaaaagaagagcaagctt

SEQ ID NO: 613 - protein, 717 aa, synthetic construct
  REGION 1..717: note = Description of sequence: ARV-HSV-sgB (HSV-2 glycoprotein B, soluble form with extracellular domain), Protein sequence
MRGGGLICALVVGALVAAVASAAPAAPRASGGVAATVAANGGPASRPPPVPSPATTRARKRKTKKPPERPEATPPPDANATVAAGHATLRAHLREIKVENADAQFYVCPPPTGATVVQFEQPRRCPTRPEGQNYTEGIAVVFKENIAPYKFKATMYYKDVTVSQVWFGHRYSQFMGIFEDRAPVPFEEVIDKINAKGVCRSTAKYVRNNMETTAFHRDDHETDMELKPAKVATRTSRGWHTTDLKYNPSRVEAFHRYGTTVNCIVEEVDARSVYPYDEFVLATGDFVYMSPFYGYREGSHTEHTSYAADRFKQVDGFYARDLTTKARATSPTTRNLLTTPKFTVAWDWVPKRPAVCTMTKWQEVDEMLRAEYGGSFRFSSDAISTTFTTNLTQYSLSRVDLGDCIGRDAREAIDRMFARKYNATHIKVGQPQYYLATGGFLIAYQPLLSNTLAELYVREYMREQDRKPRNATPAPLREAPSANASVERIKTTSSIEFARLQFTYNHIQRPVNDMLGRIAVAWCELQNHELTLWNEARKLNPNAIASATVGRRVSARMLGDVMAVSTCVPVAPDNVIVQNSMRVSSRPGTCYSRPLVSFRYEDQGPLIEGQLGENNELRLTRDALEPCTVGHRRYFIFGGGYVYFEEYAYSHQLSRADVTTVSTFIDLNITMLEDHEFVPLEVYTRHEIKDSGLLDYTEVQRRNQLHDLRFAAIDTVI

SEQ ID NO: 614 - DNA, 2473 bp, synthetic construct
  misc_feature 1..2473: note = Description of sequence: ARV-HSV-sgB (HSV-2 glycoprotein B, soluble form with extracellular domain), DNA sequence
  source 1..2473: mol_type = other DNA
gaattctaatacgactcactataaggacattagcttctgacacaactgtgttcactagcaacctcaaacagccaccatgcgcggggggggcttgatatgcgcgctggtcgtgggggcgctggtggccgcggtggcgtcggccgccccggcggccccccgcgccagcggcggcgtggccgcgaccgtcgcggcgaacgggggacccgcctcccggccgccccccgtcccgagccccgcgaccaccagggcccggaagcggaaaaccaaaaagccgcccgagcggcccgaggcgaccccgccccccgacgccaacgcgaccgtcgccgccggccacgccacgctgcgcgcgcacctgcgggaaatcaaggtcgagaacgccgatgcccagttttacgtgtgcccacccccgacaggcgccacggtggtgcagtttgagcagccgcgccgctgcccgacgcgcccggaggggcagaactacacggagggcatcgcggtggtcttcaaggagaacatcgccccgtacaaattcaaggccaccatgtactacaaagacgtgaccgtgtcgcaggtgtggttcggccaccgctactcccagtttatggggatattcgaggaccgcgcccccgtacccttcgaggaggtgatcgacaagataaacgccaagggggtctgccgctccacggccaagtacgtgcggaacaacatggagaccaccgcgtttcaccgggacgaccacgagaccgacatggagctcaagccggcgaaggtcgccacgcgcacgagccgggggtggcacaccaccgacctcaagtacaaccccagccgggtggaggcgttccatcggtacggcacgacggtcaactgcatcgtcgaggaggtggacgcgcggtcggtgtacccgtatgatgagtttgtgctggcgacgggcgactttgtgtacatgtccccgttttacggctaccgggaggggagccacaccgagcacaccagctacgccgccgaccgcttcaagcaggtcgacggcttctacgcgcgcgacctcaccacgaaggcccgggccacgagcccgacgacccgcaacttgctgacgacccccaagtttaccgtggcctgggactgggtgccgaagcgaccggcggtctgcaccatgaccaagtggcaggaggtggacgagatgctccgcgccgagtacggcggctccttccgcttctcctccgacgccatcagcaccaccttcaccaccaacctgacccagtacagcctcagccgcgtcgacctgggcgactgcatcggccgggatgcccgcgaggccatcgaccgcatgtttgcgcgcaagtacaacgccacgcacatcaaggtgggccagccgcagtactacctggccacggggggcttcctcatcgcgtaccagcccctcctcagcaacacgctcgccgagctgtacgtgcgggagtacatgcgggagcaggaccgcaagccccggaatgccacgcccgcgccactgcgggaggcgcccagcgccaacgcgagcgtggagcgcatcaagaccaccagcagcatcgagttcgcccggctgcagtttacgtataaccatatacagcgccccgtgaacgacatgctggggcgcatcgccgtcgcgtggtgcgagctgcagaaccacgagctgacactctggaacgaggcccgcaagctcaaccccaacgccatcgccagcgccaccgtcggccggcgggtgagcgcgcgcatgctcggagacgtcatggccgtctccacgtgcgtgcccgtcgccccggacaacgtgatcgtgcagaacagcatgcgcgtcagcagccggccggggacgtgctacagccgccccctggtcagctttcggtacgaagaccagggcccgctgatcgaggggcagctgggcgagaacaacgagctgcgcctcacccgcgacgcgctcgagccgtgcaccgtgggccaccggcgctacttcatcttcggcgggggctacgtatacttcgaggagtacgcgtactcacaccagctgagtcgcgccgacgtcaccaccgtcagcaccttcatcgacctgaacatcaccatgctggaggaccacgagtttgtgcccctggaggtctacacgcgccacgagatcaaggacagcggcctgctggactacacggaggtccagcgccgcaaccagctgcacgacctgcgctttgccgccatcgacacggtcatctgacgtacggctggagcctcggtggcctagcttcttgccccttgggcctccccccagcccctcctccccttcctgcacccgtacccccgtggtctttgaataaagtctgagtgggcggcaaaaaaaaaaaaaaaaaaaaaaaaaaaaaagcatatgactaaaaaaaaaaaaaaaaaaaaaaaaaaaaaaaaaaaaaaaaaaaaaaaaaaaaaaaaaaaaaaaaaaaaaaaaaagaagagcaagctt

SEQ ID NO: 615 - protein, 393 aa, synthetic construct; identical to SEQ ID NO: 195
  REGION 1..393: note = Description of sequence: ARV-HSV-gD-WT (HSV-2 glycoprotein D wildtype), Protein sequence

SEQ ID NO: 616 - DNA, 1506 bp, synthetic construct
  misc_feature 1..1506: note = Description of sequence: ARV-HSV-gD-WT (HSV-2 glycoprotein D wildtype), DNA sequence
  source 1..1506: mol_type = other DNA
gaattcggctttaatacgactcactataaggacattagcttctgacacaactgtgttcactagcaacctcaaacagccaccatggggcgattgacctccggcgtcgggacggcggccctgctagtagtcgcggtgggactccgcgtcgtctgcgccaaatacgccttagcagaccccagccttaagatggccgatcccaatcgatttcgcgggaagaaccttccggtattggaccagctgaccgacccccccggggtgaagcgagtataccacatacagccgagcctggaggacccgttccagccccccagcatcccgatcacagtgtactacgcagtgctggaacgagcctgccgcagcgtgctcctacatgccccaagcgaggccccccagatcgtgcgcggggcatccgacgaggcccgaaagcacacgtacaacctgaccatcgcctggtatcgcatgggagacaattgcgcaatccccatcacggtaatggaatacaccgagtgcccctacaacaagagcttgggggtctgccccatccgaacgcagccccgctggagctactatgacagctttagcgccgtcagcgaggataacctgggattcctgatgcacgcccccgccttcgagaccgcgggaacgtacctgcggctagtgaagataaacgactggacggagatcacacaatttatcctggagcaccgggcccgcgcctcctgcaagtacgcactccccctgcgcatccccccggcagcgtgcctcaccagcaaggcctaccaacagggcgtgacggtcgacagcatcgggatgctaccccgctttatccccgaaaaccagcgcaccgtcgccctatacagcttaaaaatcgccggctggcacggccccaagcccccgtacaccagcaccctgctgccgccggagctttccgacaccaccaacgccacgcaacccgaactcgtaccggaagaccccgaggacagcgcgctcttagaggatcccgccgggacggtgtcatcacagatccccccaaactggcacatcccgtcgatccaggacgtcgcgccgcaccacgcccccgccgcccccagcaacccgggcctgatcatcggcgcgctggccggcagtaccctggcggtgctggtcatcggcggaatagcgttttgggtacgccgccgcgcacagatggcccccaagcgcctacgactcccccacatccgggatgacgacgcgccccccagccaccagccattgttttactgacgtacggctggagcctcggtggcctagcttcttgccccttgggcctccccccagcccctcctccccttcctgcacccgtacccccgtggtctttgaataaagtctgagtgggcggcaaaaaaaaaaaaaaaaaaaaaaaaaaaaaagcatatgactaaaaaaaaaaaaaaaaaaaaaaaaaaaaaaaaaaaaaaaaaaaaaaaaaaaaaaaaaaaaaaaaaaaaaaaaaagaagagcaagctt

SEQ ID NO: 617 - protein, 393 aa, synthetic construct
  REGION 1..393: note = Description of sequence: ARV-HSV-gD (HSV-2 glycoprotein D with two AA substitutions), Protein sequence
MGRLTSGVGTAALLVVAVGLRVVCAKYALADPSLKMADPNRFRGKNLPVLDQLTDPPGVKRVYHIQPSLEDPFQPPSIPITVYYAVLERACRSVLLHAPSEAPQIVRGASDEARKHTYNLTIAWYRMGDNCAIPITVMEYTECPYNKSLGVCPIRTQPRWSYYDSFSAVSEDNLGFLMHAPAFETAGTYLRLVKINDWTEITQFILEHRARASCCYALPLRIPPAACLTSKAYQQGVTVDSIGMLPRFIPENQRTVALYSLKIAGWHGPKPPYTSTLLPPELSDTTNATQPELVPEDPEDSCLLEDPAGTVSSQIPPNWHIPSIQDVAPHHAPAAPSNPGLIIGALAGSTLAVLVIGGIAFWVRRRAQMAPKRLRLPHIRDDDAPPSHQPLFY

SEQ ID NO: 618 - DNA, 1506 bp, synthetic construct
  misc_feature 1..1506: note = Description of sequence: ARV-HSV-gD (HSV-2 glycoprotein D with two AA substitutions), DNA sequence
  source 1..1506: mol_type = other DNA
gaattcggctttaatacgactcactataaggacattagcttctgacacaactgtgttcactagcaacctcaaacagccaccatggggcgattgacctccggcgtcgggacggcggccctgctagtagtcgcggtgggactccgcgtcgtctgcgccaaatacgccttagcagaccccagccttaagatggccgatcccaatcgatttcgcgggaagaaccttccggtattggaccagctgaccgacccccccggggtgaagcgagtataccacatacagccgagcctggaggacccgttccagccccccagcatcccgatcacagtgtactacgcagtgctggaacgagcctgccgcagcgtgctcctacatgccccaagcgaggccccccagatcgtgcgcggggcatccgacgaggcccgaaagcacacgtacaacctgaccatcgcctggtatcgcatgggagacaattgcgcaatccccatcacggtaatggaatacaccgagtgcccctacaacaagagcttgggggtctgccccatccgaacgcagccccgctggagctactatgacagctttagcgccgtcagcgaggataacctgggattcctgatgcacgcccccgccttcgagaccgcgggaacgtacctgcggctagtgaagataaacgactggacggagatcacacaatttatcctggagcaccgggcccgcgcctcctgctgctacgcactccccctgcgcatccccccggcagcgtgcctcaccagcaaggcctaccaacagggcgtgacggtcgacagcatcgggatgctaccccgctttatccccgaaaaccagcgcaccgtcgccctatacagcttaaaaatcgccggctggcacggccccaagcccccgtacaccagcaccctgctgccgccggagctttccgacaccaccaacgccacgcaacccgaactcgtaccggaagaccccgaggacagctgcctcttagaggatcccgccgggacggtgtcatcacagatccccccaaactggcacatcccgtcgatccaggacgtcgcgccgcaccacgcccccgccgcccccagcaacccgggcctgatcatcggcgcgctggccggcagtaccctggcggtgctggtcatcggcggaatagcgttttgggtacgccgccgcgcacagatggcccccaagcgcctacgactcccccacatccgggatgacgacgcgccccccagccaccagccattgttttactgacgtacggctggagcctcggtggcctagcttcttgccccttgggcctccccccagcccctcctccccttcctgcacccgtacccccgtggtctttgaataaagtctgagtgggcggcaaaaaaaaaaaaaaaaaaaaaaaaaaaaaagcatatgactaaaaaaaaaaaaaaaaaaaaaaaaaaaaaaaaaaaaaaaaaaaaaaaaaaaaaaaaaaaaaaaaaaaaaaaaaagaagagcaagctt

SEQ ID NO: 619 - protein, 325 aa, synthetic construct
  REGION 1..325: note = Description of sequence: ARV-HSV-sgD (HSV-2 glycoprotein D, soluble format with extracellular domain), Protein sequence
MTRLTVLALLAGLLASSRAKYALADPSLKMADPNRFRGKNLPVLDQLTDPPGVKRVYHIQPSLEDPFQPPSIPITVYYAVLERACRSVLLHAPSEAPQIVRGASDEARKHTYNLTIAWYRMGDNCAIPITVMEYTECPYNKSLGVCPIRTQPRWSYYDSFSAVSEDNLGFLMHAPAFETAGTYLRLVKINDWTEITQFILEHRARASCCYALPLRIPPAACLTSKAYQQGVTVDSIGMLPRFIPENQRTVALYSLKIAGWHGPKPPYTSTLLPPELSDTTNATQPELVPEDPEDSCLLEDPAGTVSSQIPPNWHIPSIQDVAPHH

SEQ ID NO: 620 - DNA, 1302 bp, synthetic construct
  misc_feature 1..1302: note = Description of sequence: ARV-HSV-sgD (HSV-2 glycoprotein D, soluble format with extracellular domain), DNA sequence
  source 1..1302: mol_type = other DNA
gaattcggctttaatacgactcactataaggacattagcttctgacacaactgtgttcactagcaacctcaaacagccaccatgacccgcctgaccgtgctggccctgctggccggcctgctggcctcctcccgcgccaaatacgccttagcagaccccagccttaagatggccgatcccaatcgatttcgcgggaagaaccttccggtattggaccagctgaccgacccccccggggtgaagcgagtataccacatacagccgagcctggaggacccgttccagccccccagcatcccgatcacagtgtactacgcagtgctggaacgagcctgccgcagcgtgctcctacatgccccaagcgaggccccccagatcgtgcgcggggcatccgacgaggcccgaaagcacacgtacaacctgaccatcgcctggtatcgcatgggagacaattgcgcaatccccatcacggtaatggaatacaccgagtgcccctacaacaagagcttgggggtctgccccatccgaacgcagccccgctggagctactatgacagctttagcgccgtcagcgaggataacctgggattcctgatgcacgcccccgccttcgagaccgcgggaacgtacctgcggctagtgaagataaacgactggacggagatcacacaatttatcctggagcaccgggcccgcgcctcctgctgctacgcactccccctgcgcatccccccggcagcgtgcctcaccagcaaggcctaccaacagggcgtgacggtcgacagcatcgggatgctaccccgctttatccccgaaaaccagcgcaccgtcgccctatacagcttaaaaatcgccggctggcacggccccaagcccccgtacaccagcaccctgctgccgccggagctttccgacaccaccaacgccacgcaacccgaactcgtaccggaagaccccgaggacagctgcctcttagaggatcccgccgggacggtgtcatcacagatccccccaaactggcacatcccgtcgatccaggacgtcgcgccgcaccactgacgtacggctggagcctcggtggcctagcttcttgccccttgggcctccccccagcccctcctccccttcctgcacccgtacccccgtggtctttgaataaagtctgagtgggcggcaaaaaaaaaaaaaaaaaaaaaaaaaaaaaagcatatgactaaaaaaaaaaaaaaaaaaaaaaaaaaaaaaaaaaaaaaaaaaaaaaaaaaaaaaaaaaaaaaaaaaaaaaaaaagaagagcaagctt

SEQ ID NO: 621 - protein, 473 aa, synthetic construct
  REGION 1..473: note = Description of sequence: ARV-HSV-gC (HSV-2 glycoprotein C), Protein sequence
MRMQLLLLIALSLALVTNSASPGRTITVGPRGNASNAAPSASPRNASAPRTTPTPPQPRKATKSKASTAKPAPPPKTGPPKTSSEPVRCNRHDPLARYGSRVQIRCRFPNSTRTEFRLQIWRYATATDAEIGTAPSLEEVMVNVSAPPGGQLVYDSAPNRTDPHVIWAEGAGPGASPRLYSVVGPLGRQRLIIEELTLETQGMYYWVWGRTDRPSAYGTWVRVRVFRPPSLTIHPHAVLEGQPFKATCTAATYYPGNRAEFVWFEDGRRVFDPAQIHTQTQENPDGFSTVSTVTSAAVGGQGPPRTFTCQLTWHRDSVSFSRRNASGTASVLPRPTITMEFTGDHAVCTAGCVPEGVTFAWFLGDDSSPAEKVAVASQTSCGRPGTATIRSTLPVSYEQTEYICRLAGYPDGIPVLEHHGSHQPPPRDPTERQVIRAVEGAGIGVAVLVAVVLAGTAVVYLTHASSVRYRRLR

SEQ ID NO: 622 - DNA, 1746 bp, synthetic construct
  misc_feature 1..1746: note = Description of sequence: ARV-HSV-gC (HSV-2 glycoprotein C), DNA sequence
  source 1..1746: mol_type = other DNA
gaattcggctttaatacgactcactataaggacattagcttctgacacaactgtgttcactagcaacctcaaacagccaccatgcgcatgcagctgctgctgctgatcgccctgtccctggccctggtgaccaactccgcctcccccggccgcaccatcaccgtgggcccccgcggcaacgcctccaacgccgccccctccgcctccccccgcaacgcctccgccccccgcaccacccccacccccccccagccccgcaaggccaccaagtccaaggcctccaccgccaagcccgcccccccccccaagaccggcccccccaagacctcctccgagcccgtgcgctgcaaccgccacgaccccctggcccgctacggctcccgcgtgcagatccgctgccgcttccccaactccacccgcaccgagttccgcctgcagatctggcgctacgccaccgccaccgacgccgagatcggcaccgccccctccctggaggaggtgatggtgaacgtgtccgccccccccggcggccagctggtgtacgactccgcccccaaccgcaccgacccccacgtgatctgggccgagggcgccggccccggcgcctccccccgcctgtactccgtggtgggccccctgggccgccagcgcctgatcatcgaggagctgaccctggagacccagggcatgtactactgggtgtggggccgcaccgaccgcccctccgcctacggcacctgggtgcgcgtgcgcgtgttccgccccccctccctgaccatccacccccacgccgtgctggagggccagcccttcaaggccacctgcaccgccgccacctactaccccggcaaccgcgccgagttcgtgtggttcgaggacggccgccgcgtgttcgaccccgcccagatccacacccagacccaggagaaccccgacggcttctccaccgtgtccaccgtgacctccgccgccgtgggcggccagggccccccccgcaccttcacctgccagctgacctggcaccgcgactccgtgtccttctcccgccgcaacgcctccggcaccgcctccgtgctgccccgccccaccatcacgatggagttcaccggcgaccacgccgtgtgcaccgccggctgcgtgcccgagggcgtgaccttcgcctggttcctgggcgacgactcctcccccgccgagaaggtggccgtggcctcccagacctcctgcggccgccccggcaccgccaccatccgctccaccctgcccgtgtcctacgagcagaccgagtacatctgccgcctggccggctaccccgacggcatccccgtgctggagcaccacggcagtcaccagcccccgccgcgggaccccaccgagcggcaggtgatccgggcggtggagggggcggggatcggagtggctgtccttgtcgcggtggttctggccgggaccgcggtagtgtacctcacccacgcctcctcggtgcgctatcgtcggctgcggtaacgtacggctggagcctcggtggcctagcttcttgccccttgggcctccccccagcccctcctccccttcctgcacccgtacccccgtggtctttgaataaagtctgagtgggcggcaaaaaaaaaaaaaaaaaaaaaaaaaaaaaagcatatgactaaaaaaaaaaaaaaaaaaaaaaaaaaaaaaaaaaaaaaaaaaaaaaaaaaaaaaaaaaaaaaaaaaaaaaaaaagaagagcaagctt

SEQ ID NO: 623 - protein, 450 aa, synthetic construct
  REGION 1..450: note = Description of sequence: ARV-HSV-gE (HSV-2 glycoprotein E), Protein sequence
MRMQLLLLIALSLALVTNSRTSWKRVTSGEDVVLLPAPAGPEERTRAHKLLWAAEPLDACGPLRPSWVALWPPRRVLETVVDAACMRAPEPLAIAYSPPFPAGDEGLYSELAWRDRVAVVNESLVIYGALETDSGLYTLSVVGLSDEARQVASVVLVVEPAPVPTPTPDDYDEEDDAGVSERTPVSVPPPTPPRRPPVAPPTHPRVIPEVSHVRGVTVHMETPEAILFAPGETFGTNVSIHAIAHDDGPYAMDVVWMRFDVPSSCAEMRIYEACLYHPQLPECLSPADAPCAVSSWAYRLAVRSYAGCSRTTPPPRCFAEARMEPVPGLAWLASTVNLEFQHASPQHAGLYLCVVYVDDHIHAWGHMTISTAAQYRNAVVEQHLPQRQPEPVEPTRPHVRAPHPAPSARGPLRLGAVLGAALLLAALGLSAWACMTCWRRRSWRAVKSRA

SEQ ID NO: 624 - DNA, 1672 bp, synthetic construct
  misc_feature 1..1672: note = Description of sequence: ARV-HSV-gE (HSV-2 glycoprotein E), DNA sequence
  source 1..1672: mol_type = other DNA
gaattctaatacgactcactataaggacattagcttctgacacaactgtgttcactagcaacctcaaacagccaccatgcgcatgcagctgctgctgctgatcgccctgtccctggccctggtgaccaactcccgcacctcctggaagcgcgtgacctccggcgaggacgtggtgctgctgcccgcccccgccggccccgaggagcgcacccgcgcccacaagctgctgtgggccgccgagcccctggacgcctgcggccccctgcgcccctcctgggtggccctgtggcccccccgccgcgtgctggagaccgtggtggacgccgcctgcatgcgcgcccccgagcccctggccatcgcctactccccccccttccccgccggcgacgagggcctgtactccgagctggcctggcgcgaccgcgtggccgtggtgaacgagtccctggtgatctacggcgccctggagaccgactccggcctgtacaccctgtccgtggtgggcctgtccgacgaggcccgccaggtggcctccgtggtgctggtggtggagcccgcccccgtgcccacccccacccccgacgactacgacgaggaggacgacgccggcgtgtccgagcgcacccccgtgtccgtgcccccccccacccccccccgccgcccccccgtggccccccccacccacccccgcgtgatccccgaggtgtcccacgtgcgcggcgtgaccgtgcacatggagacccccgaggccatcctgttcgcccccggcgagaccttcggcaccaacgtgtccatccacgccatcgcccacgacgacggcccctacgcaatggacgtggtgtggatgcgcttcgacgtgccctcctcctgcgccgagatgcgcatctacgaggcctgcctgtaccacccccagctgcccgagtgcctgtcccccgccgacgccccctgcgccgtgtcctcctgggcctaccgcctggccgtgcgctcctacgccggctgctcccgcaccaccccccccccccgctgcttcgccgaggcccgcatggagcccgtgcccggcctggcctggctggcctccaccgtgaacctggagttccagcacgcctccccccagcacgccggcctgtacctgtgcgtggtgtacgtggacgaccacatccacgcctggggccacatgaccatctccaccgccgcccagtaccgcaacgccgtggtggagcagcacctgccccagcgccagcccgagcccgtggagcccacccgcccccacgtgcgcgccccccatcccgcgccctccgcgcgcggcccgctgcgcctcggggcggtgctgggggcggccctgttgctggccgccctcgggctgtccgcgtgggcgtgcatgacctgctggcgcaggcgctcctggcgggcggttaaaagccgggcctaacgtacggctggagcctcggtggcctagcttcttgccccttgggcctccccccagcccctcctccccttcctgcacccgtacccccgtggtctttgaataaagtctgagtgggcggcaaaaaaaaaaaaaaaaaaaaaaaaaaaaaagcatatgactaaaaaaaaaaaaaaaaaaaaaaaaaaaaaaaaaaaaaaaaaaaaaaaaaaaaaaaaaaaaaaaaaaaaaaaaaagaagagcaagctt

SEQ ID NO: 625 - protein, 620 aa, synthetic construct
  REGION 1..620: note = Description of sequence: ARV-HSV-MTE (Multi-T-cell-Epitopes derived from HSV-1 and HSV-2); Protein sequence
MGFEAGLMDAATPPARPPAERQGSPTPADATRYLPIAGASSVVALAPYVNKTVTGDCLPVLDMETGHIGAYVVLVDQTGNVADLLRAAAPAWSRRTLLPEHARNCVRPPDYPTPPASEWNSLWMTPVGNMLFDQGTLVGALDFGAGPMRARPRGEVRFLHYDEAGYALYRDSSSDDDESRDTARPRRSASVAGSHGPGPARAPPPPGGPVGAGGRSHAPPARTPKMTRGAPKASATPATDPARGRRPAQASGPHETITALVGAARHASPFERVRCLLLRSEGRKSRRPLTTFGSGAAAPAWSRRTLLPEHHNLFLWEDQTLLRATKNACPLLIFDRTRKFVLACPYADRLDNRLQLGMLIPGAVKRFGGHYMESVFQMYTRIAILGILVHLRIRTREASFEEETHFTQYLIYDASPLKGLSAMKTSNALCVRGARPFSHFPALMLEYFCRCAREESKRVDTSMSLADFHGEEFEKLYETQYLIYDASPLKGLSLTRMAEYDRVHIYYNHRISNQALLRMACEVRQGNWTGAPDVSALGAQGMGFLVDAIVRVAINGLLGLADTVVACVACRRLGPADRRFVALSGSLEVWASDSLNNEYLRLAAQREAAGVYDAVRTWGP

SEQ ID NO: 626 - DNA, 2187 bp, synthetic construct
  misc_feature 1..2187: note = Description of sequence: ARV-HSV-MTE (Multi-T-cell-Epitopes derived from HSV-1 and HSV-2); DNA sequence
  source 1..2187: mol_type = other DNA
gaattcggctttaatacgactcactataaggacattagcttctgacacaactgtgttcactagcaacctcaaacagccaccatgggcttcgaggccggcctgatggacgccgcgaccccgccggcccgaccgcccgcggaacggcaaggcagcccgacccccgcagacgccacccggtacctgccgatcgccggcgccagcagcgtcgtggcgctggccccctacgtgaacaagaccgtgaccggcgactgcctcccggtcctggacatggaaaccggccacatcggcgcatacgtggtgctggtggaccagacaggcaacgtggccgacctgctgcgggccgcagcccccgcgtggagcaggcggaccctactgcccgagcacgcccgcaactgcgtgcgacccccggactacccgaccccgccagcgagcgagtggaacagcctgtggatgaccccggtgggcaacatgctgttcgaccagggcacactggtgggcgccctcgacttcggcgccggcccgatgagagcccgaccaagaggcgaggtgcgcttcctgcactacgacgaggccgggtacgccctgtacagggacagcagcagcgacgacgacgagagccgggacaccgcccgccccagacggagcgccagcgtggccgggagccacggcccgggccccgccagagcgccgccgccgccaggggggccggtgggggccgggggacgaagccacgccccgccggcgagaacaccgaagatgacgcgcggcgccccgaaggccagcgcgacccccgccaccgacccggcccggggacgccgcccggcccaggccagcggcccgcacgaaacaatcacagccctggtgggcgccgcgcggcacgccagccccttcgagcgggtcaggtgcctgctgctcagaagcgagggccggaaaagccgcagaccgctaacgaccttcggcagcggcgccgcggccccggcctggagccggcgaaccctgctgcccgagcaccacaacctgttcctgtgggaggaccagaccctgctgcgggccaccaagaacgcctgccccctcctgatcttcgacagaacccgcaagttcgtgctggcctgcccctacgccgacaggctggacaaccgcctgcaactgggaatgctgatcccgggagccgtgaagcggttcggcggccactacatggaaagcgtgttccagatgtacacccggatcgcgatcctgggcatcctggtgcacctgcggatcagaacccgggaggcgagcttcgaagaagaaacccacttcacccagtacctgatctacgacgccagcccgctgaagggcctgagcgccatgaaaacaagcaacgcgctgtgcgtaaggggcgcccggccattcagccacttcccggcgctgatgctggagtacttctgcagatgcgccagagaagagagcaaacgcgtggacacaagcatgagcctggcagacttccacggcgaggagttcgagaagctgtacgagacacagtacctgatctacgacgccagcccactgaagggcctgagcctgacccggatggcagagtacgaccgggtgcacatctactacaaccaccggatcagcaaccaggcgctgctgaggatggcctgcgaggtgcgccagggcaactggaccggggcgccggacgtgagcgcgctgggcgcgcagggcatgggcttcctggtggacgcgatcgtccgggtggcgataaacggcctcctggggctggcggacaccgtggtggcctgcgtggcgtgcagacgcctgggccccgcggacagacggttcgtggccctgagcggcagcctggaggtgtgggccagcgacagcctgaacaacgagtacctgcgcctggcggcccagcgggaggcggccggcgtgtacgacgcggtccggacctggggcccgtgacgtacggctggagcctcggtggcctagcttcttgccccttgggcctccccccagcccctcctccccttcctgcacccgtacccccgtggtctttgaataaagtctgagtgggcggcaaaaaaaaaaaaaaaaaaaaaaaaaaaaaagcatatgactaaaaaaaaaaaaaaaaaaaaaaaaaaaaaaaaaaaaaaaaaaaaaaaaaaaaaaaaaaaaaaaaaaaaaaaaaagaagagcaagctt

SEQ ID NO: 627 - protein, 606 aa, synthetic construct
  REGION 1..606: note = Description of sequence: ARV-HSV-UL19UD (trucated HSV-2 UL19 UD sequence), Protein sequence
MGRLSMENAVGTVCHPSLMNIDAAVGGVNHDPVEAANPYGAYVAAPAGPGADMQQRFLNAWRQRLAHGRVRWVAECQMTAEQFMQPDNANLALELHPAFDFFAGVADVELPGGEVPPAGPGAIQATWRVVNGNLPLALCPVAFRDARGLELGVGRHAMAPATIAAVRGAFEDRSYPAVFYLLQAAIHGSEHVFCALARLVTQCITSYWNNTRCAAFVNDYSLVSYIVTYLGGDLPEECMAVYRDLVAHVEALAQLVDDFTLPGPELGGQAQAELNHLMRDPALLPPLVWDCDGLMRHAALDRHRDCRIDAGGHEPVYAAACNVATADFNRNDGRLLHNTQARAADAADDRPHRPADWTVHHKIYYYVLVPAFSRGRCCTAGVRFDRVYATLQNMVVPEIAPGEECPSDPVTDPAHPLHPANLVANTVNAMFHNGRVVVDGPAMLTLQVLAHNMAERTTALLCSAAPDAGANTASTANMRIFDGALHAGVLLMAPQHLDHTIQNGEYFYVLPVHALFAGADHVANAPNFPPALRDLARHVPLVPPALGANYFSSIRQPVVQHARESAAGENALTYALMAGYFKMSPVALYHQLKTGLHPGFGFTVVR

SEQ ID NO: 628 - DNA, 2148 bp, synthetic construct
  misc_feature 1..2148: note = Description of sequence: ARV-HSV-UL19UD (truncated HSV-2 UL19 UD sequence), DNA sequence
  source 1..2148: mol_type = other DNA
gaattcggctttaatacgactcactataaggacattagcttctgacacaactgtgttcactagcaacctcaaacagccaccatgggcaggctgagcatggaaaacgcggtgggcacagtctgccaccccagcctgatgaacatcgacgccgccgtgggcggcgtgaaccacgaccccgtggaagccgccaacccgtatggcgcctacgtggccgccccagccggccccggcgccgacatgcagcagcggttcctgaacgcctggcggcaacggctggcccacggacgggtgagatgggtggccgagtgccagatgaccgcggagcagttcatgcagccggacaacgccaacctggccctggagctgcaccccgccttcgacttcttcgccggagtggccgacgtggagctgccgggcggagaggtgccgccggccggaccgggcgccatccaggcaacgtggcgggtagtgaacggcaacctgcccctggccctctgccccgtggccttccgggacgccagaggactcgagctgggcgtaggcagacacgcgatggccccggcgaccatcgcggcggtgcgcggcgcattcgaggaccggagctaccccgccgtgttctacctgctgcaggccgccatccacggaagcgaacacgtgttctgcgccctcgcccggctggtcacccaatgcatcacgagctactggaacaacaccagatgcgccgcgttcgtgaacgactacagcctcgtgagctacatcgtgacctacctgggcggcgacctgccggaggagtgcatggcggtctaccgagacctggtcgcccacgtggaggccctggcccagctggtggacgacttcaccctgcccggcccggagctgggcgggcaggcccaggccgagctgaaccacctgatgcgggacccggcactgctcccgccgctggtgtgggactgcgacggcctgatgcgccacgccgccctggacagacaccgggactgcaggatcgacgccggaggccacgaaccggtgtacgccgccgcctgcaacgtggccaccgccgacttcaaccgcaacgacggccggctgctgcacaacacacaggccagggcggcagacgccgccgacgaccggccccacagacccgccgactggacggtccaccacaagatctactactacgtgctggtgccggcgttcagcaggggccggtgctgcaccgcgggcgtgcggttcgaccgggtgtacgccacactgcaaaacatggtggtgcccgaaatcgccccgggcgaggaatgcccgagcgaccccgtgacggacccggcgcacccgctgcacccggcgaacctggtggcgaacaccgtgaacgccatgttccacaacggcagagtggtggtggacggcccggcgatgctgaccctgcaggtgctggcgcacaacatggccgagcggaccacagcgctgctgtgcagcgccgcgcccgacgcgggggccaacaccgccagcaccgccaacatgcggatcttcgacggcgccctgcacgccggcgtcctgctgatggcgccccagcacctggaccacacgatccagaacggagagtacttctacgtgctgccggtgcacgccctgttcgccggggcggaccacgtcgcgaacgcccccaacttcccgcccgcgctgcgggacctggcccgccacgtgccgctggtccccccggccctgggcgcgaactacttcagcagcatcagacaaccggtggtccagcacgcgcgcgagagcgccgccggagagaacgccctcacctacgccctcatggccggctacttcaagatgagcccggtggcgctgtaccaccagctgaaaaccggcctgcacccgggcttcggcttcaccgtggtgcggtgataacgtacggctggagcctcggtggcctagcttcttgccccttgggcctccccccagcccctcctccccttcctgcacccgtacccccgtggtctttgaataaagtctgagtgggcggcaaaaaaaaaaaaaaaaaaaaaaaaaaaaaagcatatgactaaaaaaaaaaaaaaaaaaaaaaaaaaaaaaaaaaaaaaaaaaaaaaaaaaaaaaaaaaaaaaaaaaaaaaaaaagaagagcaagctt

SEQ ID NO: 629 - protein, 838 aa, synthetic construct
  REGION 1..838: note = Description of sequence: ARV-HSV-gH (HSV-2 glycoprotein H); Protein sequence
MGPGLWVVMGVLVGVAGGHDTYWTEQIDPWFLHGLGLARTYWRDTNTGRLWLPNTPDASDPQRGRLAPPGELNLTTASVPMLRWYAERFCFVLVTTAEFPRDPGQLLYIPKTYLLGRPRNASLPELPEAGPTSRPPAEVTQLKGLSHNPGASALLRSRAWVTFAAAPDREGLTFPRGDDGATERHPDGRRNAPPPGPPAGAPRHPTTNLSIAHLHNASVTWLAARGLLRTPGRYVYLSPSASTWPVGVWTTGGLAFGCDAALVRARYGKGFMGLVISMRDSPPAEIIVVPADKTLARVGNPTDENAPAVLPGPPAGPRYRVFVLGAPTPADNGSALDALRRVAGYPEESTNYAQYMSRAYAEFLGEDPGSGTDARPSLFWRLAGLLASSGFAFVNAAHAHDAIRLSDLLGFLAHSRVLAGLAARGAAGCAADSVFLNVSVLDPAARLRLEARLGHLVAAILEREQSLAAHALGYQLAFVLDSPAAYGAVAPSAARLIDALYAEFLGGRALTAPMVRRALFYATAVLRAPFLAGAPSAEQRERARRGLLITTALCTSDVAAATHADLRAALARTDHQKNLFWLPDHFSPCAASLRFDLAEGGFILDALAMATRSDIPADVMAQQTRGVASALTRWAHYNALIRAFVPEATHQCSGPSHNAEPRILVPITHNASYVVTHTPLPRGIGYKLTGVDVRRPLFITYLTATCEGHAREIEPKRLVRTENRRDLGLVGAVFLRYTPAGEVMSVLLVDTDATQQQLAQGPVAGTPNVFSSDVPSVALLLFPNGTVIHLLAFDTLPIATIAPGFLAASALGVVMITAALAGILRVVRTCVPFLWRRE

SEQ ID NO: 630 - DNA, 2841 bp, synthetic construct
  misc_feature 1..2841: note = Description of sequence: ARV-HSV-gH (HSV-2 glycoprotein H); DNA sequence
  source 1..2841: mol_type = other DNA
gaattcggctttaatacgactcactataaggacattagcttctgacacaactgtgttcactagcaacctcaaacagccaccatgggccccggtctgtgggtggtgatgggcgtactggtaggcgttgccgggggccatgacacgtactggacagagcaaatcgacccgtggttcttgcacggtctggggttggcccgcacgtactggcgcgacacaaacaccgggaggctgtggttgcccaacacccccgacgccagcgacccccagcgcggacgcttggcgcccccgggcgaactcaacctgacaacggcaagcgtgcccatgcttcggtggtacgccgagcgcttttgtttcgtgttggtcaccacggccgagtttccacgggaccccgggcagctgctttacatcccaaagacctatctgctcggccggccacggaacgcgagcctgcccgagcttcccgaggcggggcccacgtccaggccccccgccgaggtgacccagctcaagggactgagccacaaccccggcgcctccgcgctgttgaggtcccgggcctgggtaacattcgcggccgcgccagaccgcgaggggcttacgttcccgcggggagacgacggggcgaccgagaggcacccggacggccgacgcaacgcaccgcccccggggccgcccgcgggagcgccgaggcatccgacgacgaacctgagcattgcgcatctgcacaacgcgtccgtgacatggctggccgccaggggcctgctacggacaccgggtcggtacgtgtacctctccccgagcgcctcgacgtggcccgtgggagtctggacgacgggcgggctggcgttcgggtgcgatgccgcgcttgtgcgcgcgcgatacgggaagggcttcatggggctcgtgatttccatgcgggacagcccaccggccgagatcattgtggtgccagcggacaagaccctcgcacgggtcggaaatccgacagacgaaaacgcccccgcggtgctcccagggccaccagccggccccaggtatcgcgtcttcgtcctgggggccccgacgccagccgacaatggcagcgcgctggacgcactacggcgggtggccggctaccccgaggagagcacgaactacgcacagtatatgagccgggcctatgcggagtttctaggggaggacccgggaagcggcacggacgcgaggccgagcctgttctggcgcctcgcagggctgctcgccagcagcgggtttgcgttcgtcaacgcggcacacgcccacgacgcgattcgcctcagcgacctgctgggctttctagcccacagccgcgtgctggccggcctggccgcccggggagcagcgggctgtgcggccgacagcgtgttcctgaacgtgagcgtgttggacccggcggccaggctgcggcttgaggcgcgcctcggacatctggtggcagcgatcctcgagcgagagcagagcctagcggcgcacgcgctgggctatcagctggcgttcgtgttggacagccccgcggcctatggcgcggtggccccgagcgcggcccgcctgatcgacgcactgtacgccgagtttctcggcggccgcgcgctaaccgccccgatggtccgccgagcgctgttttacgcaacggccgtcctccgggcaccgttcctggcaggcgcgcccagcgccgagcagcgggaacgcgcccgccggggactcctcataaccacggcactgtgtacgagcgacgtagcagcggcgacccacgccgatctccgggccgcgctcgccaggaccgaccaccagaaaaacctcttctggctcccggaccacttttccccatgcgcagcatccctgcgcttcgatctcgccgaaggagggttcatcctggacgcactggcgatggccacccgatccgacatcccggcggacgtcatggcacaacagacccgcggcgtggcctccgcacttacgcgctgggcgcactacaacgccctgatccgcgccttcgtcccggaggccacccatcagtgtagcggcccgagccacaacgcggagccccggatcctcgtacccatcacccacaacgccagctatgtcgtcacacacacccccttgccacgcgggatcggatacaagctcacgggcgttgacgtccgccgcccactgtttatcacctatctcaccgccacctgcgaagggcacgcgcgggagattgagccgaaacggctggtgcgcaccgaaaaccggcgcgaccttggcctcgtgggggccgtgtttctgcgctacaccccggccggggaggtcatgagcgtgctgctagtggacacggatgccacccaacagcagctggcccaggggccggtggcgggcaccccgaacgtgttttccagcgatgtaccaagcgtggccctgttattgttccccaatggaacagtgattcatctgctggcctttgacacgctgcccatcgccaccatcgcccccgggttcctggccgcgtccgcgcttggagtcgttatgattaccgcggcactggcaggcatcctcagggtggtccgaacgtgcgtcccatttttgtggagacgcgaatgacgtacggctggagcctcggtggcctagcttcttgccccttgggcctccccccagcccctcctccccttcctgcacccgtacccccgtggtctttgaataaagtctgagtgggcggcaaaaaaaaaaaaaaaaaaaaaaaaaaaaaagcatatgactaaaaaaaaaaaaaaaaaaaaaaaaaaaaaaaaaaaaaaaaaaaaaaaaaaaaaaaaaaaaaaaaaaaaaaaaaagaagagcaagctt

SEQ ID NO: 631 - protein, 849 aa, synthetic construct
  REGION 1..849: note = Description of sequence: ARV-HSV-gH-HA (HSV-2 glycoprotein H-HA tag), Protein sequence.
MGPGLWVVMGVLVGVAGGHDTYWTEQIDPWFLHGLGLARTYWRDTNTGRLWLPNTPDASDPQRGRLAPPGELNLTTASVPMLRWYAERFCFVLVTTAEFPRDPGQLLYIPKTYLLGRPRNASLPELPEAGPTSRPPAEVTQLKGLSHNPGASALLRSRAWVTFAAAPDREGLTFPRGDDGATERHPDGRRNAPPPGPPAGAPRHPTTNLSIAHLHNASVTWLAARGLLRTPGRYVYLSPSASTWPVGVWTTGGLAFGCDAALVRARYGKGFMGLVISMRDSPPAEIIVVPADKTLARVGNPTDENAPAVLPGPPAGPRYRVFVLGAPTPADNGSALDALRRVAGYPEESTNYAQYMSRAYAEFLGEDPGSGTDARPSLFWRLAGLLASSGFAFVNAAHAHDAIRLSDLLGFLAHSRVLAGLAARGAAGCAADSVFLNVSVLDPAARLRLEARLGHLVAAILEREQSLAAHALGYQLAFVLDSPAAYGAVAPSAARLIDALYAEFLGGRALTAPMVRRALFYATAVLRAPFLAGAPSAEQRERARRGLLITTALCTSDVAAATHADLRAALARTDHQKNLFWLPDHFSPCAASLRFDLAEGGFILDALAMATRSDIPADVMAQQTRGVASALTRWAHYNALIRAFVPEATHQCSGPSHNAEPRILVPITHNASYVVTHTPLPRGIGYKLTGVDVRRPLFITYLTATCEGHAREIEPKRLVRTENRRDLGLVGAVFLRYTPAGEVMSVLLVDTDATQQQLAQGPVAGTPNVFSSDVPSVALLLFPNGTVIHLLAFDTLPIATIAPGFLAASALGVVMITAALAGILRVVRTCVPFLWRREDIYPYDVPDYA

SEQ ID NO: 632 - DNA, 2874 bp, synthetic construct
  misc_feature 1..2874: note = Description of sequence: ARV-HSV-gH-HA (HSV-2 glycoprotein H-HA tag), DNA sequence.
  source 1..2874: mol_type = other DNA
gaattcggctttaatacgactcactataaggacattagcttctgacacaactgtgttcactagcaacctcaaacagccaccatgggccccggtctgtgggtggtgatgggcgtactggtaggcgttgccgggggccatgacacgtactggacagagcaaatcgacccgtggttcttgcacggtctggggttggcccgcacgtactggcgcgacacaaacaccgggaggctgtggttgcccaacacccccgacgccagcgacccccagcgcggacgcttggcgcccccgggcgaactcaacctgacaacggcaagcgtgcccatgcttcggtggtacgccgagcgcttttgtttcgtgttggtcaccacggccgagtttccacgggaccccgggcagctgctttacatcccaaagacctatctgctcggccggccacggaacgcgagcctgcccgagcttcccgaggcggggcccacgtccaggccccccgccgaggtgacccagctcaagggactgagccacaaccccggcgcctccgcgctgttgaggtcccgggcctgggtaacattcgcggccgcgccagaccgcgaggggcttacgttcccgcggggagacgacggggcgaccgagaggcacccggacggccgacgcaacgcaccgcccccggggccgcccgcgggagcgccgaggcatccgacgacgaacctgagcattgcgcatctgcacaacgcgtccgtgacatggctggccgccaggggcctgctacggacaccgggtcggtacgtgtacctctccccgagcgcctcgacgtggcccgtgggagtctggacgacgggcgggctggcgttcgggtgcgatgccgcgcttgtgcgcgcgcgatacgggaagggcttcatggggctcgtgatttccatgcgggacagcccaccggccgagatcattgtggtgccagcggacaagaccctcgcacgggtcggaaatccgacagacgaaaacgcccccgcggtgctcccagggccaccagccggccccaggtatcgcgtcttcgtcctgggggccccgacgccagccgacaatggcagcgcgctggacgcactacggcgggtggccggctaccccgaggagagcacgaactacgcacagtatatgagccgggcctatgcggagtttctaggggaggacccgggaagcggcacggacgcgaggccgagcctgttctggcgcctcgcagggctgctcgccagcagcgggtttgcgttcgtcaacgcggcacacgcccacgacgcgattcgcctcagcgacctgctgggctttctagcccacagccgcgtgctggccggcctggccgcccggggagcagcgggctgtgcggccgacagcgtgttcctgaacgtgagcgtgttggacccggcggccaggctgcggcttgaggcgcgcctcggacatctggtggcagcgatcctcgagcgagagcagagcctagcggcgcacgcgctgggctatcagctggcgttcgtgttggacagccccgcggcctatggcgcggtggccccgagcgcggcccgcctgatcgacgcactgtacgccgagtttctcggcggccgcgcgctaaccgccccgatggtccgccgagcgctgttttacgcaacggccgtcctccgggcaccgttcctggcaggcgcgcccagcgccgagcagcgggaacgcgcccgccggggactcctcataaccacggcactgtgtacgagcgacgtagcagcggcgacccacgccgatctccgggccgcgctcgccaggaccgaccaccagaaaaacctcttctggctcccggaccacttttccccatgcgcagcatccctgcgcttcgatctcgccgaaggagggttcatcctggacgcactggcgatggccacccgatccgacatcccggcggacgtcatggcacaacagacccgcggcgtggcctccgcacttacgcgctgggcgcactacaacgccctgatccgcgccttcgtcccggaggccacccatcagtgtagcggcccgagccacaacgcggagccccggatcctcgtacccatcacccacaacgccagctatgtcgtcacacacacccccttgccacgcgggatcggatacaagctcacgggcgttgacgtccgccgcccactgtttatcacctatctcaccgccacctgcgaagggcacgcgcgggagattgagccgaaacggctggtgcgcaccgaaaaccggcgcgaccttggcctcgtgggggccgtgtttctgcgctacaccccggccggggaggtcatgagcgtgctgctagtggacacggatgccacccaacagcagctggcccaggggccggtggcgggcaccccgaacgtgttttccagcgatgtaccaagcgtggccctgttattgttccccaatggaacagtgattcatctgctggcctttgacacgctgcccatcgccaccatcgcccccgggttcctggccgcgtccgcgcttggagtcgttatgattaccgcggcactggcaggcatcctcagggtggtccgaacgtgcgtcccatttttgtggagacgcgaagatatctacccatacgacgtaccagattacgcttgacgtacggctggagcctcggtggcctagcttcttgccccttgggcctccccccagcccctcctccccttcctgcacccgtacccccgtggtctttgaataaagtctgagtgggcggcaaaaaaaaaaaaaaaaaaaaaaaaaaaaaagcatatgactaaaaaaaaaaaaaaaaaaaaaaaaaaaaaaaaaaaaaaaaaaaaaaaaaaaaaaaaaaaaaaaaaaaaaaaaaagaagagcaagctt

SEQ ID NO: 633 - protein, 1467 aa, synthetic construct
  REGION 1..1467: note = Description of sequence: Sequence of construct FCoV S-WT; Protein Sequence
MILLLTLLAVVRSEDAPHGVTLPHFNTSYNNAKFELNFYNFLQTWDIPPNTETILGGYLPYCGKGDNCGWYNFAYQQHDALNGKYAYINTQNLNIPNVHGVYFDVRERYYDDGVWDIADRVGLLIAIHGNSYYSLLMVLQDDVEENKPHVAVKICHWRPGNISTYHQFNVDLGDGGQCVFNQRFSLDTKLTADDFYGFQWTDTYVDIYLGGTITKVWVDNDWSIVEASISYHWNRVNYGYYMQFVNRTTYYAYNNTGGSNYNHLQLSECNSDYCAGYAKNVFVPIDGKIPESFSFSNWFLLSDKSTLVQGRVLSSQPVLVQCLRPVPSWSNNTAMVYFTNDVSCPNVTADVLRFNLNFSDTDVYTESTKDDQLYFTFEDNTTASIACYSSANVTDFQPANNSVSHVPFGKTAHSYFCFANFSHSLVSRQFLGILPPTVREFAFGRDGSIFVNGYKYFSLPPIKSVNFSISSVEQYGFWTIAYTNYTDVMVDVNGTGITRLFYCDSPLNRIKCQQLKHELPDGFYSASMLVKKDLPKTFVTMPQFYNWMNVTLHVVLNDTEKRADIILAKAPELASLADIHFEIAQANGSVTNVTSLCVQARQLALFYKYTSLQGLYTYSNLVELQNYDCPFSPQQFNNYLQFETLCLDVNPAVAGCKWSLVHDNKWRTQFATITVSYKEGAMITTMPKAQLGFQDISNLVKDECTDYNIYGFQGTGIIRNTTSRLVAGLYYTSISGDLLAFKNSTTGEIFTVVPCDLTAQAAVINDEIVGAITAVNQTDLFEFVNHTQSRRSRRSTLETVQTYTMPQFYYITKWNNDTSTNCTSVITYSSFAICNTGEIKYVNVTHVETVDDNIGVIKPISTGNISIPKNFTVAVQAEYIQIQVKPVVVDCAKYVCNGNRHCLSLLTQYTSACQTIENALNLGARLESLMLNDMITVSDRSLELATVEKFNTTALGGEKIGGFYFDGLSSLLPPKIGKRSAVEDLLFNKVVTSGLGTVDDDYKKCSAGTDVADLVCAQYYNGIMVLPGVVDHNKMAIYTASLIGGMAMGSITSAVAVPFAMQVQARLNYVALQTDVLQENQKILANAFNNAIGNITLALGKVSNAITTISDGFNSMASALTKIQSVVNQQGEALSQLTSQLQKNFQAISSSIAEIYNRLEKVEADAQVDRLITGRLAALNAYVSQTLTQYAEVKASRQLAMEKVNECVKSQSDRYGFCGNGTHLFSLVNSAPDGLLFFHTVLLPTEWEEVTAWSGICVNDTYAYVLKDFEYSIFSYNNTYMVTPRNMFQPRKPQMSDFVQITSCEVTFLNTTYTTFQEIVIDYIDINKTISDMLEQYNPNYTTPELDLQLEIFNQTKLNLTAEIDQLEQRADNLTNIAHELQQYIDNLNKTLVDLEWLNRIETYVKWPWYVWLLIGLVVVFCIPLLLFCCLSTGCCGCFGCLGSCCHSLCSRRQFESYEPIEKVHIH

SEQ ID NO: 634 - DNA, 4731 bp, synthetic construct
  misc_feature 1..4731: note = Description of sequence: Sequence of construct FCoV S-WT; DNA Sequence
  source 1..4731: mol_type = other DNA
gaattcggctttaatacgactcactataaggacattagcttctgacacaactgtgttcactagcaacctcaaacagccaccatgatactgttacttacacttctggccgttgtcaggtctgaagatgctcctcatggtgttactctacctcacttcaatacgtcttataacaatgccaagtttgaacttaatttttacaatttcttacaaacttgggatataccaccaaacacagaaaccattttgggcggttatctgccatattgtggaaaaggtgataattgtggatggtataattttgcttatcagcaacatgatgctctaaatggtaagtacgcttacataaacacacaaaatctgaatataccaaacgttcatggcgtctacttcgacgtgcgagaaaggtattatgatgatggcgtgtgggatatagctgatagagttggtctattgattgccatacatggaaattcgtattacagtttgcttatggttttacaagatgacgtggaagaaaataagcctcacgttgcagttaaaatctgccattggaggccaggtaatataagcacttaccatcaatttaatgttgatttaggagacggtggtcaatgcgtgtttaaccagagattctcattggacaccaaattgacagctgatgatttttatggcttccagtggactgatacatatgtagacatatatttaggtggcactattactaaagtgtgggttgacaatgactggagtattgttgaagccagtatttcctaccattggaatcgcgttaactatggctactacatgcaatttgtcaaccgcaccacgtattatgcctacaataatactggtggttcaaattacaaccatctgcagttgagcgagtgcaatagtgattattgtgctggttatgctaagaacgtctttgtgccaattgatggcaaaataccagaaagcttttcttttagtaactggtttctgctatcagataaatccaccttagtgcaagggcgtgttcttagtagtcagccggttcttgtacaatgtctcaggcctgtaccatcgtggtctaacaatactgctatggtgtattttacaaatgatgtctcttgccctaacgtcacggcagacgttctgaggttcaatctaaattttagtgacactgatgtttatacggagtcaactaaggatgatcagttgtatttcacattcgaagataatacaactgcttctatagcctgttatagcagtgctaatgttactgacttccaaccagcaaataatagcgtctcacatgttccatttggtaaaactgcgcattcttatttctgttttgccaatttttctcactctcttgtgagtagacagtttctgggcatacttccaccaactgttcgagagtttgctttcggcagagatggatccatttttgttaatggttataaatactttagtctaccacctattaagagtgttaatttctccattagctcagttgagcagtatggcttttggaccatagcctacactaactacacagatgtaatggtggatgttaatggaacaggtattactaggttgttctattgtgactcacccctcaataggattaagtgccaacaattgaagcatgaactaccagatgggttttattctgctagcatgcttgtcaaaaaggatctacctaaaacatttgtaactatgccacaattttataactggatgaatgttacgttacatgtcgtgttgaatgacactgagaagagagctgatattatcttggctaaggctccagaactagcctcacttgctgatatacattttgaaatagcccaggctaatggcagtgtaactaatgttactagcctatgtgtacaagcaagacagttagctctattttataagtatactagcttacaaggtttgtatacctattctaatcttgtggagttacaaaattatgactgtcctttttcgccacagcagtttaataattatttgcagtttgaaactttgtgtcttgatgtaaatccagctgttgcaggttgtaagtggtcgttagtccatgataataagtggcgcacacagttcgccactatcactgtttcctacaaagaaggtgctatgattacaactatgccaaaagcacagctgggcttccaagatatttctaatttggtaaaagatgaatgcactgattacaacatatatggatttcagggcacaggcattattagaaataccacctcacgtttagtggctggcctctactacacatctatcagtggcgaccttcttgcttttaaaaatagtactactggggaaattttcactgtagtgccatgtgatttaacagcacaggcagctgtgattaacgatgaaatagtgggagctataacagccgttaatcaaactgatctatttgaatttgtcaatcacacacagtcgagaaggtcacgtaggtcaacactagaaacagtacaaacctacactatgccgcaattttattacataacaaagtggaataatgacacatcgactaattgtacgtctgtcattacgtactcctcctttgctatttgtaatactggtgaaattaaatatgttaatgtcactcatgttgaaacggtggatgataatatcggtgttatcaaacctatttcaacaggtaacatatctatacctaaaaatttcacagtggcagtgcaagctgaatatattcagattcaagtcaaacctgttgttgtagattgtgccaagtacgtctgcaatggtaatagacattgccttagcttgctaacacaatacacatcagcttgtcaaacgattgaaaatgcccttaatcttggtgcacgtcttgaatctttgatgcttaacgatatgatcacagtgtcagatcgtagtctggaacttgcaaccgttgaaaagtttaataccactgctctaggtggtgaaaaaatcggtggtttttactttgatggcttgagtagtctgttaccacctaaaataggtaagaggtctgctgttgaggatttattgtttaataaggtggtaaccagtggtcttggtactgttgatgatgattataaaaagtgctcagccggcactgatgtagctgacttagtttgtgcccaatattacaatggcataatggttttacctggtgttgtagaccacaataagatggctatctatactgcctctctaataggaggtatggccatgggctctattacatctgctgtggctgtcccttttgcaatgcaagtgcaggctaggcttaattatgttgcattgcaaacggatgtcctacaggaaaaccagaaaatacttgctaatgcctttaataatgccattggtaacattacactagcacttggaaaagtttccaatgctattacgaccatatcagatggttttaatagtatggcttcagcactgactaagatccagagtgtagttaatcagcagggtgaagcgttgagtcaacttaccagtcagttacagaaaaacttccaagctattagtagttccattgctgaaatttacaatagattggaaaaagtggaagctgatgctcaagttgatcgtctcattactggtagattggcagcacttaatgcttatgtatcccaaactttaactcagtatgctgaagtcaaggctagtagacaacttgcaatggaaaaagttaatgagtgtgtgaaatcacagtcggataggtatggtttctgtggcaatggaacccacttattctctcttgtcaattctgcacctgatggtttgcttttctttcacacagtgttacttcctacggagtgggaagaggtgacggcatggtcaggaatatgtgttaacgacacatatgcatatgtgttgaaagattttgaatattctattttcagctacaataacacgtatatggtgactcctcgtaatatgttccagcctagaaaacctcagatgagtgatttcgtgcaaattacgagctgtgaagtgacattcctgaacactacatatacgacatttcaggagattgtgattgattatattgatatcaacaagactatctctgatatgcttgaacaatataaccccaactacacgacacctgaattagatttacagctggaaatcttcaatcagacaaagttaaatctcactgcagaaatagaccaattggaacaaagagctgacaatcttacgaacatagcacacgaactacaacagtacattgacaatcttaataagacacttgttgaccttgaatggctcaacaggattgaaacttatgtaaaatggccttggtatgtgtggctacttattggtttagtagtcgtcttctgcatacctttgttactgttttgctgtcttagtactggttgctgtgggtgctttggttgtcttggcagttgttgtcactctctttgtagtagacgtcaatttgaaagctatgaacctattgaaaaggttcacattcattaatgacgtacggctggagcctcggtggcctagcttcttgccccttgggcctccccccagcccctcctccccttcctgcacccgtacccccgtggtctttgaataaagtctgagtgggcggcaaaaaaaaaaaaaaaaaaaaaaaaaaaaaagcatatgactaaaaaaaaaaaaaaaaaaaaaaaaaaaaaaaaaaaaaaaaaaaaaaaaaaaaaaaaaaaaaaaaaaaaaaaaaagaagagcaagctt

SEQ ID NO: 635 - protein, 1195 aa, synthetic construct
  REGION 1..1195: note = Description of sequence: Sequence of construct FCoV S-2P; Protein Sequence
MILLLTLLAVVRSEDAAKNVFVPIDGKIPESFSFSNWFLLTDKSTLVQGRVLSKQPVFVQCLRPVPTSSNVTAVVHFKNDVFCPNVTADVLRFNLNFSDSNYTESNNTDQLYFTFEDNTTASIACYSSANVTDFQPANNSVSHIPFGKTTHSYFCFANFSHSVVSRQFLGILPPTVREFAFGRDGSIFVNGYKYFSLPPIKSVNFSITPVSNNTFWTIAYTNYTDVMVDVNGTGITRLFYCDSPLNRIKCQQLKHELPDGFYSASMLVKKDLPKTFVTMPQFYNWMNVTLHVVLNDTEKKADIILAKAPELASLADIHFEIAQANGSVTNVTSLCVQTRQLALFYKYTSLQGLYTYSNLVELQNYDCPFSPQQFNNYLQFETLCFDVNPAVAGCKWSLVHDVKWRTQFATITVSYKDGAMITTMPKAQLGFQDISNLVKDECTDYNIYGFQGTGIIRNTTSRLVAGLYYTSASGDLLAFKNSTTGEIFTVVPCDLTAQAAVINDEIVGAITAVNQTDLFEFVGGNGSVTTYTMPQFYYITKWNNDTSTNCTSVITYSSFAICNTGEIKYVNVTHVEIVDDSIGVIKPISTGNITIPKNFTVAVQAEYIQIQVKPVVVDCAKYVCNGNRHCLSLLTQYTSACQTIENALNLGARLESLMLNDMITVSDRSLELATVEKFNTTVLGGEKLGGFYFDGLSSLLPPTIGKRSAVEDLLFNKVVTSGLGTVDDDYKKCSAGTDVADLVCAQYYNGIMVLPGVVDDNKMAMYTASLIGGMAMGSITSAVAVPFAMQVQARLNYVALQTDVLQENQKILANAFNNAIGNITLALGKVSNAITTISDGFNTMASALTKIQSVVNQQGEALSQLISQLQKNFQAISSSIAEIYNRLEPPEADAQVDRLITGRLAALNAYVSQTLTQYAEVKASRQLAMEKVNECVKSQSDRYGFCGNGTHLFSLVNSAPDGLLFFHTVLLPTEWEEVTAWSGICVNDTYAYVLKDFEYSIFSYNNTYMVTPRNMFQPRKPQMSDFVQITSCEVTFLNTTYTTFQEIVIDYIDINKTIADMLEQYNPNYTTPELDLQLEIFNQTKLNLTAEIDQLEQRADNLTTIAHELQQYIDNLNKTLVDLEWLNRIETYVKWPWYVWLLIGLVVVFCIPLLLFCCLSTGCCGCFGCLGSCCHSLCSRRQFESYEPIEKVHIH

SEQ ID NO: 636 - DNA, 3915 bp, synthetic construct
  misc_feature 1..3915: note = Description of sequence: Sequence of construct FCoV S-2P; DNA Sequence
  source 1..3915: mol_type = other DNA
gaattcggctttaatacgactcactataaggacattagcttctgacacaactgtgttcactagcaacctcaaacagccaccatgattctgctgctgactctgttagcagtggtcagaagtgaggatgctgctaagaatgtgtttgtccctatagatggcaagatcccagaatccttcagcttctcgaactggttcctgttgaccgacaagagcactttggtccagggacgcgtgctgagcaaacaaccagtcttcgtccagtgcctccgcccagtgccaacaagcagcaacgtcacagcggttgtgcactttaaaaatgatgtcttctgtccaaatgttaccgctgatgtgcttagattcaatctcaacttttctgattccaattacacagaatccaacaacacggaccagctctacttcactttcgaggacaacacaaccgctagtatcgcctgctactcctcagcgaatgttaccgatttccaaccagccaacaatagcgtgagtcacatcccttttgggaagacaacccacagctacttctgcttcgcaaatttcagtcattctgtcgttagccggcaattcttggggatcctgccgcctaccgtgcgggagtttgccttcggacgggacggctcgatctttgtcaacggctacaagtattttagtctcccgccgatcaaatcggtgaacttctcaattacacctgtctccaataataccttctggacaattgcatacacaaattacacagatgtgatggtggatgttaacgggacaggaattaccaggctgttctactgtgacagtcctttgaacaggataaagtgccagcagttgaagcatgaactgccagatgggttctattctgcttccatgctggtcaagaaagatctcccaaaaacgttcgtgacaatgcctcaattctacaactggatgaacgtaaccctgcacgtcgtactaaatgataccgagaagaaggctgatatcatcctcgcaaaggctccagagctggcttccctggcagatattcacttcgagattgcacaggccaatggctctgtgacgaatgttacctcgctgtgtgtgcagacgaggcagctggccctcttctataagtataccagcctgcaaggcctgtatacgtatagtaatttggtggaattgcagaattatgactgccccttttctccacagcagtttaataactacctgcaatttgagaccctctgctttgatgtaaaccctgcagtcgccgggtgtaagtggtcactggtgcatgacgttaagtggagaacccagtttgctacgataacagtgtcgtacaaagacggagctatgataactactatgcccaaagcccagcttggcttccaggacatttcgaaccttgtgaaggatgaatgtaccgactataatatctatggattccaggggacaggcatcatccggaacaccacctcccgactggtggccggcttgtattacacttctgcatctggcgatttgctagcctttaagaactccactactggggagatcttcaccgtcgttccctgtgatctgacagctcaggccgcagttattaatgatgagattgtcggtgccattaccgccgtgaaccagactgatctctttgaatttgtgggcggtaatggatcagtgactacatacaccatgcctcagttttattatatcaccaagtggaacaatgacacttcaaccaactgcacctctgtcattacatactccagctttgctatctgcaacacaggagaaatcaagtacgtcaatgtaacccatgtggagatcgtcgatgattcaatcggagtcattaaacctatatcaactggaaacatcacaatccccaagaattttactgtcgcagtgcaagcagagtacattcagatccaggtcaagcctgtagtggtggactgtgccaaatatgtttgcaatggaaataggcactgcctgtccctgctcactcagtatacttcagcctgtcaaactattgagaatgcactcaacctcggggcccgtcttgagtcactgatgttgaatgatatgatcaccgtgtctgaccggtctttggaacttgcaacggtggagaagttcaacaccacagtacttggaggagaaaaactcggtggcttctactttgacgggctgagttctctattgcctccaaccatcggaaagaggagcgctgtggaagacctgttattcaataaagttgttacatctggtctgggcaccgtggacgatgactacaaaaaatgttccgcaggcactgatgtcgctgacctggtgtgcgcccagtactataatggtatcatggttttacccggtgtggttgacgataataagatggccatgtatacggccagcctgataggcggcatggcaatgggctccatcacgtcagccgttgcggtgcccttcgccatgcaggtgcaagcgcgtctaaactacgtggcgcttcagaccgacgtgctgcaggaaaatcaaaagatactagccaacgcgttcaacaatgctatcgggaatattactcttgccttggggaaagtgagtaatgccatcactaccatctctgatggcttcaacaccatggctagtgccctcaccaagatacagtccgtagtgaatcagcagggtgaggctcttagccagttgatctcccagctgcagaagaactttcaagcaatttcttcttccatagctgaaatttacaaccgcctggagccaccggaggccgatgcccaggtagataggctgattacagggcgtctcgccgctcttaatgcctatgtcagccagaccttgacacagtacgcagaggttaaagcaagtcggcagttagcgatggagaaagttaatgagtgcgtgaaatcccaatccgaccggtatggcttttgtggcaatggaacacacctgttttcgttggtgaacagcgctcctgacggtctcctattcttccacaccgtgttgctgcccacagaatgggaggaggtgacagcctggagcgggatttgtgtcaacgacacctatgcctacgttctcaaagactttgaatacagcatttttagttacaataacacgtacatggtcacacccagaaacatgtttcagccccgaaagccccagatgagcgattttgttcagataacctcgtgtgaagtgacctttctgaatactacttacaccacgtttcaggagatcgtcattgactatattgacataaacaagactattgctgacatgcttgaacagtacaacccaaactatactactcctgagttggaccttcagctggagatctttaaccaaacaaaactgaacctgactgcagaaatagatcagctcgagcagagagccgataacctaacaaccatagctcatgagctccagcaatacatcgacaatctgaacaagactcttgtagacctggaatggttgaacagaatcgaaacatacgtaaaatggccctggtatgtgtggctcctcatcggcctcgtcgtagtgttctgcatccccctgttgcttttttgttgcctgtctactggttgctgtggttgttttggatgtctcggcagctgctgccactccctgtgcagcagacgccagttcgagagctatgaacccatcgagaaggttcatattcattgataacgtacggctggagcctcggtggcctagcttcttgccccttgggcctccccccagcccctcctccccttcctgcacccgtacccccgtggtctttgaataaagtctgagtgggcggcaaaaaaaaaaaaaaaaaaaaaaaaaaaaaagcatatgactaaaaaaaaaaaaaaaaaaaaaaaaaaaaaaaaaaaaaaaaaaaaaaaaaaaaaaaaaaaaaaaaaaaaaaaaaagaagagcaagctt

SEQ ID NO: 637 - protein, 1195 aa, synthetic construct
  REGION 1..1195: note = Description of sequence: Sequence of construct FCoV S-2P2CD; Protein Sequence
MILLLTLLAVVRSEDAAKNVFVPIDGKIPESFSFSNWFLLTDKSTLVQGRVLSKQPVFVQCLRPVPTSSNVTAVVHFKNDVFCPNVTADVLRFNLNFSDSNYTESNNTDQLYFTFEDNTTASIACYSSANVTDFQPANNSVSHIPFGKTTHSYFCFANFSHSVVSRQFLGILPPTVREFAFGRDGSIFVNGYKYFSLPPIKSVNFSITPVSNNTFWTIAYTNYTDVMVDVNGTGITRLFYCDSPLNRIKCRQLKHELPDGFYSASMLVKKDLPKTFVTMPQFYNWMNVTLHVVLNDTEKKADIILAKAPELASLADIHFEIAQANGSVTNVTSLCVQTRQLALFYKYTSLQGLYTYSNLVELQNYDCPFSPQKFNNYLQFETLCFDVNPAVAGCKWSLVHDVKWRTQFATITVSYKDGAMITTMPKAQLGFQDISNLVKDECTDYNIYGFQGTGIIRNTTSRLVAGLYYTSASGDLLAFKNSTTGEIFTVVPCDLTAQAAVINDEIVGAITAVNQTDLFEFVGGNGSVTTYTMPQFYYITKWNNDTSTNCTSVITYSSFAICNTGEIKYVNVTHVEIVDDSIGVIKPISTGNITIPKNFTVAVQAEYIQIQVKPVVVDCAKYVCNGNRHCLSLLTQYTSACQTIENALNLGARLESLMLNDMITVSDRSLELATVEKFNTTVLGGEKLGGFYFDGLSSLLPPTIGKRSAVEDLLFNKVVTSGLGTVDDDYKKCSAGTDVADLVCAQYYNGIMVLPGVVDDNKMAMYTASLIGGMAMGSITSAVAVPFAMQVQARLNYVALQTDVLQENQKILANAFNNAIGNITLALGKVSNAITTISDGFNTMASALTKIQSVVNQQGEALSQLISQLQKNFQAISSSIAEIYNRLDPPEADAQVDRLITGRLAALNAYVSQTLTQYAEVKASRQLAMEKVNECVKSQSDRYGFCGNGTHLFSLVNSAPDGLLFFHTVLLPTEWEEVTAWSGICVNDTYAYVLKDFEYSIFSYNNTYMVTPRNMFQPRKPQMSDFVQITSCEVTFLNTTYTTFQEIVIDYIDINKTIADMLEQYNPNYTTPELDLQLEIFNQTKLNLTAEIDQLEQRADNLTTIAHELQQYIDNLNKTLVDLEWLNRIETYVKWPWYVWLLIGLVVVFCIPLLLFCCLSTGCCGCFGCLGSCCHSLCSRRQFESYEPIEKVHIH

SEQ ID NO: 638 - DNA, 3915 bp, synthetic construct
  misc_feature 1..3915: note = Description of sequence: Sequence of construct FCoV S-2P2CD; DNA Sequence
  source 1..3915: mol_type = other DNA
gaattcggctttaatacgactcactataaggacattagcttctgacacaactgtgttcactagcaacctcaaacagccaccatgattctgctgctgactctgttagcagtggtcagaagtgaggatgctgctaagaatgtgtttgtccctatagatggcaagatcccagaatccttcagcttctcgaactggttcctgttgaccgacaagagcactttggtccagggacgcgtgctgagcaaacaaccagtcttcgtccagtgcctccgcccagtgccaacaagcagcaacgtcacagcggttgtgcactttaaaaatgatgtcttctgtccaaatgttaccgctgatgtgcttagattcaatctcaacttttctgattccaattacacagaatccaacaacacggaccagctctacttcactttcgaggacaacacaaccgctagtatcgcctgctactcctcagcgaatgttaccgatttccaaccagccaacaatagcgtgagtcacatcccttttgggaagacaacccacagctacttctgcttcgcaaatttcagtcattctgtcgttagccggcaattcttggggatcctgccgcctaccgtgcgggagtttgccttcggacgggacggctcgatctttgtcaacggctacaagtattttagtctcccgccgatcaaatcggtgaacttctcaattacacctgtctccaataataccttctggacaattgcatacacaaattacacagatgtgatggtggatgttaacgggacaggaattaccaggctgttctactgtgacagtcctttgaacaggataaagtgcaggcagttgaagcatgaactgccagatgggttctattctgcttccatgctggtcaagaaagatctcccaaaaacgttcgtgacaatgcctcaattctacaactggatgaacgtaaccctgcacgtcgtactaaatgataccgagaagaaggctgatatcatcctcgcaaaggctccagagctggcttccctggcagatattcacttcgagattgcacaggccaatggctctgtgacgaatgttacctcgctgtgtgtgcagacgaggcagctggccctcttctataagtataccagcctgcaaggcctgtatacgtatagtaatttggtggaattgcagaattatgactgccccttttctccacagaaatttaataactacctgcaatttgagaccctctgctttgatgtaaaccctgcagtcgccgggtgtaagtggtcactggtgcatgacgttaagtggagaacccagtttgctacgataacagtgtcgtacaaagacggagctatgataactactatgcccaaagcccagcttggcttccaggacatttcgaaccttgtgaaggatgaatgtaccgactataatatctatggattccaggggacaggcatcatccggaacaccacctcccgactggtggccggcttgtattacacttctgcatctggcgatttgctagcctttaagaactccactactggggagatcttcaccgtcgttccctgtgatctgacagctcaggccgcagttattaatgatgagattgtcggtgccattaccgccgtgaaccagactgatctctttgaatttgtgggcggtaatggatcagtgactacatacaccatgcctcagttttattatatcaccaagtggaacaatgacacttcaaccaactgcacctctgtcattacatactccagctttgctatctgcaacacaggagaaatcaagtacgtcaatgtaacccatgtggagatcgtcgatgattcaatcggagtcattaaacctatatcaactggaaacatcacaatccccaagaattttactgtcgcagtgcaagcagagtacattcagatccaggtcaagcctgtagtggtggactgtgccaaatatgtttgcaatggaaataggcactgcctgtccctgctcactcagtatacttcagcctgtcaaactattgagaatgcactcaacctcggggcccgtcttgagtcactgatgttgaatgatatgatcaccgtgtctgaccggtctttggaacttgcaacggtggagaagttcaacaccacagtacttggaggagaaaaactcggtggcttctactttgacgggctgagttctctattgcctccaaccatcggaaagaggagcgctgtggaagacctgttattcaataaagttgttacatctggtctgggcaccgtggacgatgactacaaaaaatgttccgcaggcactgatgtcgctgacctggtgtgcgcccagtactataatggtatcatggttttacccggtgtggttgacgataataagatggccatgtatacggccagcctgataggcggcatggcaatgggctccatcacgtcagccgttgcggtgcccttcgccatgcaggtgcaagcgcgtctaaactacgtggcgcttcagaccgacgtgctgcaggaaaatcaaaagatactagccaacgcgttcaacaatgctatcgggaatattactcttgccttggggaaagtgagtaatgccatcactaccatctctgatggcttcaacaccatggctagtgccctcaccaagatacagtccgtagtgaatcagcagggtgaggctcttagccagttgatctcccagctgcagaagaactttcaagcaatttcttcttccatagctgaaatttacaaccgcctggacccaccggaggccgatgcccaggtagataggctgattacagggcgtctcgccgctcttaatgcctatgtcagccagaccttgacacagtacgcagaggttaaagcaagtcggcagttagcgatggagaaagttaatgagtgcgtgaaatcccaatccgaccggtatggcttttgtggcaatggaacacacctgttttcgttggtgaacagcgctcctgacggtctcctattcttccacaccgtgttgctgcccacagaatgggaggaggtgacagcctggagcgggatttgtgtcaacgacacctatgcctacgttctcaaagactttgaatacagcatttttagttacaataacacgtacatggtcacacccagaaacatgtttcagccccgaaagccccagatgagcgattttgttcagataacctcgtgtgaagtgacctttctgaatactacttacaccacgtttcaggagatcgtcattgactatattgacataaacaagactattgctgacatgcttgaacagtacaacccaaactatactactcctgagttggaccttcagctggagatctttaaccaaacaaaactgaacctgactgcagaaatagatcagctcgagcagagagccgataacctaacaaccatagctcatgagctccagcaatacatcgacaatctgaacaagactcttgtagacctggaatggttgaacagaatcgaaacatacgtaaaatggccctggtatgtgtggctcctcatcggcctcgtcgtagtgttctgcatccccctgttgcttttttgttgcctgtctactggttgctgtggttgttttggatgtctcggcagctgctgccactccctgtgcagcagacgccagttcgagagctatgaacccatcgagaaggttcatattcattgataacgtacggctggagcctcggtggcctagcttcttgccccttgggcctccccccagcccctcctccccttcctgcacccgtacccccgtggtctttgaataaagtctgagtgggcggcaaaaaaaaaaaaaaaaaaaaaaaaaaaaaagcatatgactaaaaaaaaaaaaaaaaaaaaaaaaaaaaaaaaaaaaaaaaaaaaaaaaaaaaaaaaaaaaaaaaaaaaaaaaaagaagagcaagctt

SEQ ID NO: 639 - protein, 1195 aa, synthetic construct
  REGION 1..1195: note = Description of sequence: Sequence of construct FCoV S-4P; Protein  Sequence
MILLLTLLAVVRSEDAAKNVFVPIDGKIPESFSFSNWFLLTDKSTLVQGRVLSKQPVFVQCLRPVPTSSNVTAVVHFKNDVFCPNVTADVLRFNLNFSDSNYTESNNTDQLYFTFEDNTTASIACYSSANVTDFQPANNSVSHIPFGKTTHSYFCFANFSHSVVSRQFLGILPPTVREFAFGRDGSIFVNGYKYFSLPPIKSVNFSITPVSNNTFWTIAYTNYTDVMVDVNGTGITRLFYCDSPLNRIKCQQLKHELPDGFYSASMLVKKDLPKTFVTMPQFYNWMNVTLHVVLNDTEKKADIILAKAPELASLADIHFEIAQANGSVTNVTSLCVQTRQLALFYKYTSLQGLYTYSNLVELQNYDCPFSPQQFNNYLQFETLCFDVNPAVAGCKWSLVHDVKWRTQFATITVSYKDGAMITTMPKAQLGFQDISNLVKDECTDYNIYGFQGTGIIRNTTSRLVAGLYYTSASGDLLAFKNSTTGEIFTVVPCDLTAQAAVINDEIVGAITAVNQTDLFEFVGGNGSVTTYTMPQFYYITKWNNDTSTNCTSVITYSSFAICNTGEIKYVNVTHVEIVDDSIGVIKPISTGNITIPKNFTVAVQAEYIQIQVKPVVVDCAKYVCNGNRHCLSLLTQYTSACQTIENALNLGARLESLMLNDMITVSDRSLELATVEKFNTTVLGGEKLGGFYFDGLSSLLPPTIGKRSAVEDLLFNKVVTSGLGTVDDDYKKCSAGTDVADLVCAQYYNGIMVLPGVVDDNKMAMYTASLIGGMAMGSITSAVAVPFAMQVQARLNYVALQTDVLPENQKILANAFNNAIGNITLALGKGSNAITTISPGFNTMASALTKIQSVVNQQGEALSQLISQLQKNFQAISSSIAEIYNRLEPPEADAQVDRLITGRLAALNAYVSQTLTQYAEVKASRQLAMEKVNECVKSQSDRYGFCGNGTHLFSLVNSAPDGLLFFHTVLLPTEWEEVTAWSGICVNDTYAYVLKDFEYSIFSYNNTYMVTPRNMFQPRKPQMSDFVQITSCEVTFLNTTYTTFQEIVIDYIDINKTIADMLEQYNPNYTTPELDLQLEIFNQTKLNLTAEIDQLEQRADNLTTIAHELQQYIDNLNKTLVDLEWLNRIETYVKWPWYVWLLIGLVVVFCIPLLLFCCLSTGCCGCFGCLGSCCHSLCSRRQFESYEPIEKVHIH

SEQ ID NO: 640 - DNA, 3915 bp, synthetic construct
  misc_feature 1..3915: note = Description of sequence: Sequence of construct FCoV S-4P; DNA Sequence
  source 1..3915: mol_type = other DNA
gaattcggctttaatacgactcactataaggacattagcttctgacacaactgtgttcactagcaacctcaaacagccaccatgattctgctgctgactctgttagcagtggtcagaagtgaggatgctgctaagaatgtgtttgtccctatagatggcaagatcccagaatccttcagcttctcgaactggttcctgttgaccgacaagagcactttggtccagggacgcgtgctgagcaaacaaccagtcttcgtccagtgcctccgcccagtgccaacaagcagcaacgtcacagcggttgtgcactttaaaaatgatgtcttctgtccaaatgttaccgctgatgtgcttagattcaatctcaacttttctgattccaattacacagaatccaacaacacggaccagctctacttcactttcgaggacaacacaaccgctagtatcgcctgctactcctcagcgaatgttaccgatttccaaccagccaacaatagcgtgagtcacatcccttttgggaagacaacccacagctacttctgcttcgcaaatttcagtcattctgtcgttagccggcaattcttggggatcctgccgcctaccgtgcgggagtttgccttcggacgggacggctcgatctttgtcaacggctacaagtattttagtctcccgccgatcaaatcggtgaacttctcaattacacctgtctccaataataccttctggacaattgcatacacaaattacacagatgtgatggtggatgttaacgggacaggaattaccaggctgttctactgtgacagtcctttgaacaggataaagtgccagcagttgaagcatgaactgccagatgggttctattctgcttccatgctggtcaagaaagatctcccaaaaacgttcgtgacaatgcctcaattctacaactggatgaacgtaaccctgcacgtcgtactaaatgataccgagaagaaggctgatatcatcctcgcaaaggctccagagctggcttccctggcagatattcacttcgagattgcacaggccaatggctctgtgacgaatgttacctcgctgtgtgtgcagacgaggcagctggccctcttctataagtataccagcctgcaaggcctgtatacgtatagtaatttggtggaattgcagaattatgactgccccttttctccacagcagtttaataactacctgcaatttgagaccctctgctttgatgtaaaccctgcagtcgccgggtgtaagtggtcactggtgcatgacgttaagtggagaacccagtttgctacgataacagtgtcgtacaaagacggagctatgataactactatgcccaaagcccagcttggcttccaggacatttcgaaccttgtgaaggatgaatgtaccgactataatatctatggattccaggggacaggcatcatccggaacaccacctcccgactggtggccggcttgtattacacttctgcatctggcgatttgctagcctttaagaactccactactggggagatcttcaccgtcgttccctgtgatctgacagctcaggccgcagttattaatgatgagattgtcggtgccattaccgccgtgaaccagactgatctctttgaatttgtgggcggtaatggatcagtgactacatacaccatgcctcagttttattatatcaccaagtggaacaatgacacttcaaccaactgcacctctgtcattacatactccagctttgctatctgcaacacaggagaaatcaagtacgtcaatgtaacccatgtggagatcgtcgatgattcaatcggagtcattaaacctatatcaactggaaacatcacaatccccaagaattttactgtcgcagtgcaagcagagtacattcagatccaggtcaagcctgtagtggtggactgtgccaaatatgtttgcaatggaaataggcactgcctgtccctgctcactcagtatacttcagcctgtcaaactattgagaatgcactcaacctcggggcccgtcttgagtcactgatgttgaatgatatgatcaccgtgtctgaccggtctttggaacttgcaacggtggagaagttcaacaccacagtacttggaggagaaaaactcggtggcttctactttgacgggctgagttctctattgcctccaaccatcggaaagaggagcgctgtggaagacctgttattcaataaagttgttacatctggtctgggcaccgtggacgatgactacaaaaaatgttccgcaggcactgatgtcgctgacctggtgtgcgcccagtactataatggtatcatggttttacccggtgtggttgacgataataagatggccatgtatacggccagcctgataggcggcatggcaatgggctccatcacgtcagccgttgcggtgcccttcgccatgcaggtgcaagcgcgtctaaactacgtggcgcttcagaccgacgtgctgccggaaaatcaaaagatactagccaacgcgttcaacaatgctatcgggaatattactcttgccttggggaaagggagtaatgccatcactaccatctctccaggcttcaacaccatggctagtgccctcaccaagatacagtccgtagtgaatcagcagggtgaggctcttagccagttgatctcccagctgcagaagaactttcaagcaatttcttcttccatagctgaaatttacaaccgcctggagccaccggaggccgatgcccaggtagataggctgattacagggcgtctcgccgctcttaatgcctatgtcagccagaccttgacacagtacgcagaggttaaagcaagtcggcagttagcgatggagaaagttaatgagtgcgtgaaatcccaatccgaccggtatggcttttgtggcaatggaacacacctgttttcgttggtgaacagcgctcctgacggtctcctattcttccacaccgtgttgctgcccacagaatgggaggaggtgacagcctggagcgggatttgtgtcaacgacacctatgcctacgttctcaaagactttgaatacagcatttttagttacaataacacgtacatggtcacacccagaaacatgtttcagccccgaaagccccagatgagcgattttgttcagataacctcgtgtgaagtgacctttctgaatactacttacaccacgtttcaggagatcgtcattgactatattgacataaacaagactattgctgacatgcttgaacagtacaacccaaactatactactcctgagttggaccttcagctggagatctttaaccaaacaaaactgaacctgactgcagaaatagatcagctcgagcagagagccgataacctaacaaccatagctcatgagctccagcaatacatcgacaatctgaacaagactcttgtagacctggaatggttgaacagaatcgaaacatacgtaaaatggccctggtatgtgtggctcctcatcggcctcgtcgtagtgttctgcatccccctgttgcttttttgttgcctgtctactggttgctgtggttgttttggatgtctcggcagctgctgccactccctgtgcagcagacgccagttcgagagctatgaacccatcgagaaggttcatattcattgataacgtacggctggagcctcggtggcctagcttcttgccccttgggcctccccccagcccctcctccccttcctgcacccgtacccccgtggtctttgaataaagtctgagtgggcggcaaaaaaaaaaaaaaaaaaaaaaaaaaaaaagcatatgactaaaaaaaaaaaaaaaaaaaaaaaaaaaaaaaaaaaaaaaaaaaaaaaaaaaaaaaaaaaaaaaaaaaaaaaaaagaagagcaagctt

SEQ ID NO: 641 - protein, 1206 aa, synthetic construct
  REGION 1..1206: note = Description of sequence: Sequence of construct FCoV S-2P-HA; Protein Sequence
MILLLTLLAVVRSEDAAKNVFVPIDGKIPESFSFSNWFLLTDKSTLVQGRVLSKQPVFVQCLRPVPTSSNVTAVVHFKNDVFCPNVTADVLRFNLNFSDSNYTESNNTDQLYFTFEDNTTASIACYSSANVTDFQPANNSVSHIPFGKTTHSYFCFANFSHSVVSRQFLGILPPTVREFAFGRDGSIFVNGYKYFSLPPIKSVNFSITPVSNNTFWTIAYTNYTDVMVDVNGTGITRLFYCDSPLNRIKCQQLKHELPDGFYSASMLVKKDLPKTFVTMPQFYNWMNVTLHVVLNDTEKKADIILAKAPELASLADIHFEIAQANGSVTNVTSLCVQTRQLALFYKYTSLQGLYTYSNLVELQNYDCPFSPQQFNNYLQFETLCFDVNPAVAGCKWSLVHDVKWRTQFATITVSYKDGAMITTMPKAQLGFQDISNLVKDECTDYNIYGFQGTGIIRNTTSRLVAGLYYTSASGDLLAFKNSTTGEIFTVVPCDLTAQAAVINDEIVGAITAVNQTDLFEFVGGNGSVTTYTMPQFYYITKWNNDTSTNCTSVITYSSFAICNTGEIKYVNVTHVEIVDDSIGVIKPISTGNITIPKNFTVAVQAEYIQIQVKPVVVDCAKYVCNGNRHCLSLLTQYTSACQTIENALNLGARLESLMLNDMITVSDRSLELATVEKFNTTVLGGEKLGGFYFDGLSSLLPPTIGKRSAVEDLLFNKVVTSGLGTVDDDYKKCSAGTDVADLVCAQYYNGIMVLPGVVDDNKMAMYTASLIGGMAMGSITSAVAVPFAMQVQARLNYVALQTDVLQENQKILANAFNNAIGNITLALGKVSNAITTISDGFNTMASALTKIQSVVNQQGEALSQLISQLQKNFQAISSSIAEIYNRLEPPEADAQVDRLITGRLAALNAYVSQTLTQYAEVKASRQLAMEKVNECVKSQSDRYGFCGNGTHLFSLVNSAPDGLLFFHTVLLPTEWEEVTAWSGICVNDTYAYVLKDFEYSIFSYNNTYMVTPRNMFQPRKPQMSDFVQITSCEVTFLNTTYTTFQEIVIDYIDINKTIADMLEQYNPNYTTPELDLQLEIFNQTKLNLTAEIDQLEQRADNLTTIAHELQQYIDNLNKTLVDLEWLNRIETYVKWPWYVWLLIGLVVVFCIPLLLFCCLSTGCCGCFGCLGSCCHSLCSRRQFESYEPIEKVHIHDIYPYDVPDYA

SEQ ID NO: 642 - DNA, 3945 bp, synthetic construct
  misc_feature 1..3945: note = Description of sequence: Sequence of construct FCoV S-2P-HA; DNA Sequence
  source 1..3945: mol_type = other DNA
gaattcggctttaatacgactcactataaggacattagcttctgacacaactgtgttcactagcaacctcaaacagccaccatgattctgctgctgactctgttagcagtggtcagaagtgaggatgctgctaagaatgtgtttgtccctatagatggcaagatcccagaatccttcagcttctcgaactggttcctgttgaccgacaagagcactttggtccagggacgcgtgctgagcaaacaaccagtcttcgtccagtgcctccgcccagtgccaacaagcagcaacgtcacagcggttgtgcactttaaaaatgatgtcttctgtccaaatgttaccgctgatgtgcttagattcaatctcaacttttctgattccaattacacagaatccaacaacacggaccagctctacttcactttcgaggacaacacaaccgctagtatcgcctgctactcctcagcgaatgttaccgatttccaaccagccaacaatagcgtgagtcacatcccttttgggaagacaacccacagctacttctgcttcgcaaatttcagtcattctgtcgttagccggcaattcttggggatcctgccgcctaccgtgcgggagtttgccttcggacgggacggctcgatctttgtcaacggctacaagtattttagtctcccgccgatcaaatcggtgaacttctcaattacacctgtctccaataataccttctggacaattgcatacacaaattacacagatgtgatggtggatgttaacgggacaggaattaccaggctgttctactgtgacagtcctttgaacaggataaagtgccagcagttgaagcatgaactgccagatgggttctattctgcttccatgctggtcaagaaagatctcccaaaaacgttcgtgacaatgcctcaattctacaactggatgaacgtaaccctgcacgtcgtactaaatgataccgagaagaaggctgatatcatcctcgcaaaggctccagagctggcttccctggcagatattcacttcgagattgcacaggccaatggctctgtgacgaatgttacctcgctgtgtgtgcagacgaggcagctggccctcttctataagtataccagcctgcaaggcctgtatacgtatagtaatttggtggaattgcagaattatgactgccccttttctccacagcagtttaataactacctgcaatttgagaccctctgctttgatgtaaaccctgcagtcgccgggtgtaagtggtcactggtgcatgacgttaagtggagaacccagtttgctacgataacagtgtcgtacaaagacggagctatgataactactatgcccaaagcccagcttggcttccaggacatttcgaaccttgtgaaggatgaatgtaccgactataatatctatggattccaggggacaggcatcatccggaacaccacctcccgactggtggccggcttgtattacacttctgcatctggcgatttgctagcctttaagaactccactactggggagatcttcaccgtcgttccctgtgatctgacagctcaggccgcagttattaatgatgagattgtcggtgccattaccgccgtgaaccagactgatctctttgaatttgtgggcggtaatggatcagtgactacatacaccatgcctcagttttattatatcaccaagtggaacaatgacacttcaaccaactgcacctctgtcattacatactccagctttgctatctgcaacacaggagaaatcaagtacgtcaatgtaacccatgtggagatcgtcgatgattcaatcggagtcattaaacctatatcaactggaaacatcacaatccccaagaattttactgtcgcagtgcaagcagagtacattcagatccaggtcaagcctgtagtggtggactgtgccaaatatgtttgcaatggaaataggcactgcctgtccctgctcactcagtatacttcagcctgtcaaactattgagaatgcactcaacctcggggcccgtcttgagtcactgatgttgaatgatatgatcaccgtgtctgaccggtctttggaacttgcaacggtggagaagttcaacaccacagtacttggaggagaaaaactcggtggcttctactttgacgggctgagttctctattgcctccaaccatcggaaagaggagcgctgtggaagacctgttattcaataaagttgttacatctggtctgggcaccgtggacgatgactacaaaaaatgttccgcaggcactgatgtcgctgacctggtgtgcgcccagtactataatggtatcatggttttacccggtgtggttgacgataataagatggccatgtatacggccagcctgataggcggcatggcaatgggctccatcacgtcagccgttgcggtgcccttcgccatgcaggtgcaagcgcgtctaaactacgtggcgcttcagaccgacgtgctgcaggaaaatcaaaagatactagccaacgcgttcaacaatgctatcgggaatattactcttgccttggggaaagtgagtaatgccatcactaccatctctgatggcttcaacaccatggctagtgccctcaccaagatacagtccgtagtgaatcagcagggtgaggctcttagccagttgatctcccagctgcagaagaactttcaagcaatttcttcttccatagctgaaatttacaaccgcctggagccaccggaggccgatgcccaggtagataggctgattacagggcgtctcgccgctcttaatgcctatgtcagccagaccttgacacagtacgcagaggttaaagcaagtcggcagttagcgatggagaaagttaatgagtgcgtgaaatcccaatccgaccggtatggcttttgtggcaatggaacacacctgttttcgttggtgaacagcgctcctgacggtctcctattcttccacaccgtgttgctgcccacagaatgggaggaggtgacagcctggagcgggatttgtgtcaacgacacctatgcctacgttctcaaagactttgaatacagcatttttagttacaataacacgtacatggtcacacccagaaacatgtttcagccccgaaagccccagatgagcgattttgttcagataacctcgtgtgaagtgacctttctgaatactacttacaccacgtttcaggagatcgtcattgactatattgacataaacaagactattgctgacatgcttgaacagtacaacccaaactatactactcctgagttggaccttcagctggagatctttaaccaaacaaaactgaacctgactgcagaaatagatcagctcgagcagagagccgataacctaacaaccatagctcatgagctccagcaatacatcgacaatctgaacaagactcttgtagacctggaatggttgaacagaatcgaaacatacgtaaaatggccctggtatgtgtggctcctcatcggcctcgtcgtagtgttctgcatccccctgttgcttttttgttgcctgtctactggttgctgtggttgttttggatgtctcggcagctgctgccactccctgtgcagcagacgccagttcgagagctatgaacccatcgagaaggttcatattcatgatatctacccatacgacgtaccagattacgcttgacgtacggctggagcctcggtggcctagcttcttgccccttgggcctccccccagcccctcctccccttcctgcacccgtacccccgtggtctttgaataaagtctgagtgggcggcaaaaaaaaaaaaaaaaaaaaaaaaaaaaaagcatatgactaaaaaaaaaaaaaaaaaaaaaaaaaaaaaaaaaaaaaaaaaaaaaaaaaaaaaaaaaaaaaaaaaaaaaaaaaagaagagcaagctt

SEQ ID NO: 643 - protein, 1206 aa, synthetic construct
  REGION 1..1206: note = Description of sequence: Sequence of construct FCoV S-4P-HA;
MILLLTLLAVVRSEDAAKNVFVPIDGKIPESFSFSNWFLLTDKSTLVQGRVLSKQPVFVQCLRPVPTSSNVTAVVHFKNDVFCPNVTADVLRFNLNFSDSNYTESNNTDQLYFTFEDNTTASIACYSSANVTDFQPANNSVSHIPFGKTTHSYFCFANFSHSVVSRQFLGILPPTVREFAFGRDGSIFVNGYKYFSLPPIKSVNFSITPVSNNTFWTIAYTNYTDVMVDVNGTGITRLFYCDSPLNRIKCQQLKHELPDGFYSASMLVKKDLPKTFVTMPQFYNWMNVTLHVVLNDTEKKADIILAKAPELASLADIHFEIAQANGSVTNVTSLCVQTRQLALFYKYTSLQGLYTYSNLVELQNYDCPFSPQQFNNYLQFETLCFDVNPAVAGCKWSLVHDVKWRTQFATITVSYKDGAMITTMPKAQLGFQDISNLVKDECTDYNIYGFQGTGIIRNTTSRLVAGLYYTSASGDLLAFKNSTTGEIFTVVPCDLTAQAAVINDEIVGAITAVNQTDLFEFVGGNGSVTTYTMPQFYYITKWNNDTSTNCTSVITYSSFAICNTGEIKYVNVTHVEIVDDSIGVIKPISTGNITIPKNFTVAVQAEYIQIQVKPVVVDCAKYVCNGNRHCLSLLTQYTSACQTIENALNLGARLESLMLNDMITVSDRSLELATVEKFNTTVLGGEKLGGFYFDGLSSLLPPTIGKRSAVEDLLFNKVVTSGLGTVDDDYKKCSAGTDVADLVCAQYYNGIMVLPGVVDDNKMAMYTASLIGGMAMGSITSAVAVPFAMQVQARLNYVALQTDVLPENQKILANAFNNAIGNITLALGKGSNAITTISPGFNTMASALTKIQSVVNQQGEALSQLISQLQKNFQAISSSIAEIYNRLEPPEADAQVDRLITGRLAALNAYVSQTLTQYAEVKASRQLAMEKVNECVKSQSDRYGFCGNGTHLFSLVNSAPDGLLFFHTVLLPTEWEEVTAWSGICVNDTYAYVLKDFEYSIFSYNNTYMVTPRNMFQPRKPQMSDFVQITSCEVTFLNTTYTTFQEIVIDYIDINKTIADMLEQYNPNYTTPELDLQLEIFNQTKLNLTAEIDQLEQRADNLTTIAHELQQYIDNLNKTLVDLEWLNRIETYVKWPWYVWLLIGLVVVFCIPLLLFCCLSTGCCGCFGCLGSCCHSLCSRRQFESYEPIEKVHIHDIYPYDVPDYA

SEQ ID NO: 644 - DNA, 3945 bp, synthetic construct
  misc_feature 1..3945: note = Description of sequence: Sequence of construct FCoV S-4P-HA; DNA Sequence
  source 1..3945: mol_type = other DNA
gaattcggctttaatacgactcactataaggacattagcttctgacacaactgtgttcactagcaacctcaaacagccaccatgattctgctgctgactctgttagcagtggtcagaagtgaggatgctgctaagaatgtgtttgtccctatagatggcaagatcccagaatccttcagcttctcgaactggttcctgttgaccgacaagagcactttggtccagggacgcgtgctgagcaaacaaccagtcttcgtccagtgcctccgcccagtgccaacaagcagcaacgtcacagcggttgtgcactttaaaaatgatgtcttctgtccaaatgttaccgctgatgtgcttagattcaatctcaacttttctgattccaattacacagaatccaacaacacggaccagctctacttcactttcgaggacaacacaaccgctagtatcgcctgctactcctcagcgaatgttaccgatttccaaccagccaacaatagcgtgagtcacatcccttttgggaagacaacccacagctacttctgcttcgcaaatttcagtcattctgtcgttagccggcaattcttggggatcctgccgcctaccgtgcgggagtttgccttcggacgggacggctcgatctttgtcaacggctacaagtattttagtctcccgccgatcaaatcggtgaacttctcaattacacctgtctccaataataccttctggacaattgcatacacaaattacacagatgtgatggtggatgttaacgggacaggaattaccaggctgttctactgtgacagtcctttgaacaggataaagtgccagcagttgaagcatgaactgccagatgggttctattctgcttccatgctggtcaagaaagatctcccaaaaacgttcgtgacaatgcctcaattctacaactggatgaacgtaaccctgcacgtcgtactaaatgataccgagaagaaggctgatatcatcctcgcaaaggctccagagctggcttccctggcagatattcacttcgagattgcacaggccaatggctctgtgacgaatgttacctcgctgtgtgtgcagacgaggcagctggccctcttctataagtataccagcctgcaaggcctgtatacgtatagtaatttggtggaattgcagaattatgactgccccttttctccacagcagtttaataactacctgcaatttgagaccctctgctttgatgtaaaccctgcagtcgccgggtgtaagtggtcactggtgcatgacgttaagtggagaacccagtttgctacgataacagtgtcgtacaaagacggagctatgataactactatgcccaaagcccagcttggcttccaggacatttcgaaccttgtgaaggatgaatgtaccgactataatatctatggattccaggggacaggcatcatccggaacaccacctcccgactggtggccggcttgtattacacttctgcatctggcgatttgctagcctttaagaactccactactggggagatcttcaccgtcgttccctgtgatctgacagctcaggccgcagttattaatgatgagattgtcggtgccattaccgccgtgaaccagactgatctctttgaatttgtgggcggtaatggatcagtgactacatacaccatgcctcagttttattatatcaccaagtggaacaatgacacttcaaccaactgcacctctgtcattacatactccagctttgctatctgcaacacaggagaaatcaagtacgtcaatgtaacccatgtggagatcgtcgatgattcaatcggagtcattaaacctatatcaactggaaacatcacaatccccaagaattttactgtcgcagtgcaagcagagtacattcagatccaggtcaagcctgtagtggtggactgtgccaaatatgtttgcaatggaaataggcactgcctgtccctgctcactcagtatacttcagcctgtcaaactattgagaatgcactcaacctcggggcccgtcttgagtcactgatgttgaatgatatgatcaccgtgtctgaccggtctttggaacttgcaacggtggagaagttcaacaccacagtacttggaggagaaaaactcggtggcttctactttgacgggctgagttctctattgcctccaaccatcggaaagaggagcgctgtggaagacctgttattcaataaagttgttacatctggtctgggcaccgtggacgatgactacaaaaaatgttccgcaggcactgatgtcgctgacctggtgtgcgcccagtactataatggtatcatggttttacccggtgtggttgacgataataagatggccatgtatacggccagcctgataggcggcatggcaatgggctccatcacgtcagccgttgcggtgcccttcgccatgcaggtgcaagcgcgtctaaactacgtggcgcttcagaccgacgtgctgccggaaaatcaaaagatactagccaacgcgttcaacaatgctatcgggaatattactcttgccttggggaaagggagtaatgccatcactaccatctctccaggcttcaacaccatggctagtgccctcaccaagatacagtccgtagtgaatcagcagggtgaggctcttagccagttgatctcccagctgcagaagaactttcaagcaatttcttcttccatagctgaaatttacaaccgcctggagccaccggaggccgatgcccaggtagataggctgattacagggcgtctcgccgctcttaatgcctatgtcagccagaccttgacacagtacgcagaggttaaagcaagtcggcagttagcgatggagaaagttaatgagtgcgtgaaatcccaatccgaccggtatggcttttgtggcaatggaacacacctgttttcgttggtgaacagcgctcctgacggtctcctattcttccacaccgtgttgctgcccacagaatgggaggaggtgacagcctggagcgggatttgtgtcaacgacacctatgcctacgttctcaaagactttgaatacagcatttttagttacaataacacgtacatggtcacacccagaaacatgtttcagccccgaaagccccagatgagcgattttgttcagataacctcgtgtgaagtgacctttctgaatactacttacaccacgtttcaggagatcgtcattgactatattgacataaacaagactattgctgacatgcttgaacagtacaacccaaactatactactcctgagttggaccttcagctggagatctttaaccaaacaaaactgaacctgactgcagaaatagatcagctcgagcagagagccgataacctaacaaccatagctcatgagctccagcaatacatcgacaatctgaacaagactcttgtagacctggaatggttgaacagaatcgaaacatacgtaaaatggccctggtatgtgtggctcctcatcggcctcgtcgtagtgttctgcatccccctgttgcttttttgttgcctgtctactggttgctgtggttgttttggatgtctcggcagctgctgccactccctgtgcagcagacgccagttcgagagctatgaacccatcgagaaggttcatattcatgatatctacccatacgacgtaccagattacgcttgacgtacggctggagcctcggtggcctagcttcttgccccttgggcctccccccagcccctcctccccttcctgcacccgtacccccgtggtctttgaataaagtctgagtgggcggcaaaaaaaaaaaaaaaaaaaaaaaaaaaaaagcatatgactaaaaaaaaaaaaaaaaaaaaaaaaaaaaaaaaaaaaaaaaaaaaaaaaaaaaaaaaaaaaaaaaaaaaaaaaaagaagagcaagctt

SEQ ID NO: 645 - protein, 1206 aa, synthetic construct
  REGION 1..1206: note = Description of sequence: Sequence of construct FCoV S-2P2CD-HA; Protein Sequence
MILLLTLLAVVRSEDAAKNVFVPIDGKIPESFSFSNWFLLTDKSTLVQGRVLSKQPVFVQCLRPVPTSSNVTAVVHFKNDVFCPNVTADVLRFNLNFSDSNYTESNNTDQLYFTFEDNTTASIACYSSANVTDFQPANNSVSHIPFGKTTHSYFCFANFSHSVVSRQFLGILPPTVREFAFGRDGSIFVNGYKYFSLPPIKSVNFSITPVSNNTFWTIAYTNYTDVMVDVNGTGITRLFYCDSPLNRIKCRQLKHELPDGFYSASMLVKKDLPKTFVTMPQFYNWMNVTLHVVLNDTEKKADIILAKAPELASLADIHFEIAQANGSVTNVTSLCVQTRQLALFYKYTSLQGLYTYSNLVELQNYDCPFSPQKFNNYLQFETLCFDVNPAVAGCKWSLVHDVKWRTQFATITVSYKDGAMITTMPKAQLGFQDISNLVKDECTDYNIYGFQGTGIIRNTTSRLVAGLYYTSASGDLLAFKNSTTGEIFTVVPCDLTAQAAVINDEIVGAITAVNQTDLFEFVGGNGSVTTYTMPQFYYITKWNNDTSTNCTSVITYSSFAICNTGEIKYVNVTHVEIVDDSIGVIKPISTGNITIPKNFTVAVQAEYIQIQVKPVVVDCAKYVCNGNRHCLSLLTQYTSACQTIENALNLGARLESLMLNDMITVSDRSLELATVEKFNTTVLGGEKLGGFYFDGLSSLLPPTIGKRSAVEDLLFNKVVTSGLGTVDDDYKKCSAGTDVADLVCAQYYNGIMVLPGVVDDNKMAMYTASLIGGMAMGSITSAVAVPFAMQVQARLNYVALQTDVLQENQKILANAFNNAIGNITLALGKVSNAITTISDGFNTMASALTKIQSVVNQQGEALSQLISQLQKNFQAISSSIAEIYNRLDPPEADAQVDRLITGRLAALNAYVSQTLTQYAEVKASRQLAMEKVNECVKSQSDRYGFCGNGTHLFSLVNSAPDGLLFFHTVLLPTEWEEVTAWSGICVNDTYAYVLKDFEYSIFSYNNTYMVTPRNMFQPRKPQMSDFVQITSCEVTFLNTTYTTFQEIVIDYIDINKTIADMLEQYNPNYTTPELDLQLEIFNQTKLNLTAEIDQLEQRADNLTTIAHELQQYIDNLNKTLVDLEWLNRIETYVKWPWYVWLLIGLVVVFCIPLLLFCCLSTGCCGCFGCLGSCCHSLCSRRQFESYEPIEKVHIHDIYPYDVPDYA

SEQ ID NO: 646 - DNA, 3945 bp, synthetic construct
  misc_feature 1..3945: note = Description of sequence: Sequence of construct FCoV S-2P2CD-HA; DNA Sequence
  source 1..3945: mol_type = other DNA
gaattcggctttaatacgactcactataaggacattagcttctgacacaactgtgttcactagcaacctcaaacagccaccatgattctgctgctgactctgttagcagtggtcagaagtgaggatgctgctaagaatgtgtttgtccctatagatggcaagatcccagaatccttcagcttctcgaactggttcctgttgaccgacaagagcactttggtccagggacgcgtgctgagcaaacaaccagtcttcgtccagtgcctccgcccagtgccaacaagcagcaacgtcacagcggttgtgcactttaaaaatgatgtcttctgtccaaatgttaccgctgatgtgcttagattcaatctcaacttttctgattccaattacacagaatccaacaacacggaccagctctacttcactttcgaggacaacacaaccgctagtatcgcctgctactcctcagcgaatgttaccgatttccaaccagccaacaatagcgtgagtcacatcccttttgggaagacaacccacagctacttctgcttcgcaaatttcagtcattctgtcgttagccggcaattcttggggatcctgccgcctaccgtgcgggagtttgccttcggacgggacggctcgatctttgtcaacggctacaagtattttagtctcccgccgatcaaatcggtgaacttctcaattacacctgtctccaataataccttctggacaattgcatacacaaattacacagatgtgatggtggatgttaacgggacaggaattaccaggctgttctactgtgacagtcctttgaacaggataaagtgcaggcagttgaagcatgaactgccagatgggttctattctgcttccatgctggtcaagaaagatctcccaaaaacgttcgtgacaatgcctcaattctacaactggatgaacgtaaccctgcacgtcgtactaaatgataccgagaagaaggctgatatcatcctcgcaaaggctccagagctggcttccctggcagatattcacttcgagattgcacaggccaatggctctgtgacgaatgttacctcgctgtgtgtgcagacgaggcagctggccctcttctataagtataccagcctgcaaggcctgtatacgtatagtaatttggtggaattgcagaattatgactgccccttttctccacagaaatttaataactacctgcaatttgagaccctctgctttgatgtaaaccctgcagtcgccgggtgtaagtggtcactggtgcatgacgttaagtggagaacccagtttgctacgataacagtgtcgtacaaagacggagctatgataactactatgcccaaagcccagcttggcttccaggacatttcgaaccttgtgaaggatgaatgtaccgactataatatctatggattccaggggacaggcatcatccggaacaccacctcccgactggtggccggcttgtattacacttctgcatctggcgatttgctagcctttaagaactccactactggggagatcttcaccgtcgttccctgtgatctgacagctcaggccgcagttattaatgatgagattgtcggtgccattaccgccgtgaaccagactgatctctttgaatttgtgggcggtaatggatcagtgactacatacaccatgcctcagttttattatatcaccaagtggaacaatgacacttcaaccaactgcacctctgtcattacatactccagctttgctatctgcaacacaggagaaatcaagtacgtcaatgtaacccatgtggagatcgtcgatgattcaatcggagtcattaaacctatatcaactggaaacatcacaatccccaagaattttactgtcgcagtgcaagcagagtacattcagatccaggtcaagcctgtagtggtggactgtgccaaatatgtttgcaatggaaataggcactgcctgtccctgctcactcagtatacttcagcctgtcaaactattgagaatgcactcaacctcggggcccgtcttgagtcactgatgttgaatgatatgatcaccgtgtctgaccggtctttggaacttgcaacggtggagaagttcaacaccacagtacttggaggagaaaaactcggtggcttctactttgacgggctgagttctctattgcctccaaccatcggaaagaggagcgctgtggaagacctgttattcaataaagttgttacatctggtctgggcaccgtggacgatgactacaaaaaatgttccgcaggcactgatgtcgctgacctggtgtgcgcccagtactataatggtatcatggttttacccggtgtggttgacgataataagatggccatgtatacggccagcctgataggcggcatggcaatgggctccatcacgtcagccgttgcggtgcccttcgccatgcaggtgcaagcgcgtctaaactacgtggcgcttcagaccgacgtgctgcaggaaaatcaaaagatactagccaacgcgttcaacaatgctatcgggaatattactcttgccttggggaaagtgagtaatgccatcactaccatctctgatggcttcaacaccatggctagtgccctcaccaagatacagtccgtagtgaatcagcagggtgaggctcttagccagttgatctcccagctgcagaagaactttcaagcaatttcttcttccatagctgaaatttacaaccgcctggacccaccggaggccgatgcccaggtagataggctgattacagggcgtctcgccgctcttaatgcctatgtcagccagaccttgacacagtacgcagaggttaaagcaagtcggcagttagcgatggagaaagttaatgagtgcgtgaaatcccaatccgaccggtatggcttttgtggcaatggaacacacctgttttcgttggtgaacagcgctcctgacggtctcctattcttccacaccgtgttgctgcccacagaatgggaggaggtgacagcctggagcgggatttgtgtcaacgacacctatgcctacgttctcaaagactttgaatacagcatttttagttacaataacacgtacatggtcacacccagaaacatgtttcagccccgaaagccccagatgagcgattttgttcagataacctcgtgtgaagtgacctttctgaatactacttacaccacgtttcaggagatcgtcattgactatattgacataaacaagactattgctgacatgcttgaacagtacaacccaaactatactactcctgagttggaccttcagctggagatctttaaccaaacaaaactgaacctgactgcagaaatagatcagctcgagcagagagccgataacctaacaaccatagctcatgagctccagcaatacatcgacaatctgaacaagactcttgtagacctggaatggttgaacagaatcgaaacatacgtaaaatggccctggtatgtgtggctcctcatcggcctcgtcgtagtgttctgcatccccctgttgcttttttgttgcctgtctactggttgctgtggttgttttggatgtctcggcagctgctgccactccctgtgcagcagacgccagttcgagagctatgaacccatcgagaaggttcatattcatgatatctacccatacgacgtaccagattacgcttgacgtacggctggagcctcggtggcctagcttcttgccccttgggcctccccccagcccctcctccccttcctgcacccgtacccccgtggtctttgaataaagtctgagtgggcggcaaaaaaaaaaaaaaaaaaaaaaaaaaaaaagcatatgactaaaaaaaaaaaaaaaaaaaaaaaaaaaaaaaaaaaaaaaaaaaaaaaaaaaaaaaaaaaaaaaaaaaaaaaaaagaagagcaagctt

SEQ ID NO: 647 - protein, 882 aa, synthetic construct
  REGION 1..882: note = Description of sequence: Sequence of construct FCoV II-RBD-MN; Protein Sequence
MILLILALLSTARSEDATHTAVNITIDLGMKRSGYGQPIASTLSNITLPMQDNNTDVYCIRSNQFSVYVHSTCKSSLWDNIFNQDCTDVLEATAVIKTGTCPFSFDKLNNYLTFNKFCLSLSPVGANCKFDVAARTRTNEQVVRSLYVIYEEGDNIVGVPSDNSGGSGGSGGSGGSGGSGYIPEAPRDGQAYVRKDGEWVLLSTFLATNFSLLKQAGDVEENPGPKYILLILACIIACVYGERYCAMQGASTSCINGTENSCQTCFERGDLIWHLANWNFSWSVILIVFITVLQYGRPQFSWLVYGIKMLIMWLLWPIVLALTIFNAYSEYQVSRYVMFGFSVAGAVVTFALWMMYFVRSIQLYRRTKSWWSFNPETNAILCVNALGRSYVLPLDGTPTGVTLTLLSGNLYAEGFKMAGGLTIEHLPKYVMIATPSRTIVYTLVGKQLKATTATGWAYYVKSKAGDYSTEARTDNLSEHEKLLHMVATNFSLLKQAGDVEENPGPMATQGQRVNWGDEPSKRRGRSNSRGRKNNDIPLSFYNPITLESGSKFWNVCPRDFVPKGIGNKDQQIGYWNRQERYRIVKGQRKELPERWFFYFLGTGPHADAKFKDKIDGVFWVARDGAMNKPTTLGTRGTNNESKPLKFDGKIPPQFQLEVNRSRNNSRSGSQSRSVSRNRSQSRGRQQSNNQNNNVEDTIVAVLQKLGVTDKQRSRSKSRDRSDSKSRDTTPKNANKHTWKKTAGKGDVTNFYGARSASANFGDSDLVANGNAAKCYPQIAECVPSVSSMLFGSQWSAEEAGDQVKVTLTHTYYLPKDDAKTSQFLEQIDAYKRPSQVAKDQRQRKSRSKSADKKPEELSVTLVEAYTDVFDDTQVEMIDEVTN

SEQ ID NO: 648 - DNA, 2976 bp, synthetic construct
  misc_feature 1..2976: note = Description of sequence: Sequence of construct FCoV II-RBD-MN; DNA Sequence
  source 1..2976: mol_type = other DNA
gaattcggctttaatacgactcactataaggacattagcttctgacacaactgtgttcactagcaacctcaaacagccaccatgatactgttaatattagcgcttcttagtaccgctaggtctgaagatgctacgcacacagctgtgaatatcaccatcgacctaggaatgaagcgtagtggctatgggcagcccattgcatctacactgagcaacataacgttgccaatgcaagacaataacacagacgtttattgcatcagatctaaccagttctcagtgtatgtgcattcaacctgtaaatcttccctgtgggacaatatattcaatcaggactgcaccgatgttctggaagccacagccgtcatcaaaacaggaacctgcccattttcgtttgacaaactgaataactacctgacctttaataagttctgtctcagtctgtcgccggtaggagctaactgcaaattcgacgtggcagcgagaacaagaactaatgaacaggtggtgcggagcctgtatgttatttatgaagagggggataacatcgtaggggtccctagtgataatagcggaggctcgggcgggtctggtgggtctgggggttcagggggctccggctacatccctgaagctccgagagacggccaggcctacgtcagaaaagatggagagtgggtgctcctatccaccttcctggctactaacttcagcctgctgaagcaggctggagacgtggaggagaaccctggacctaagtacattctcctgatactggcctgcatcatcgcgtgtgtgtacggagaacgctactgtgcaatgcagggagcatcaactagctgtatcaacggcacagagaacagctgccagacctgtttcgaaagaggagacctcatttggcacctggccaactggaatttcagttggtccgtaatcctcatagtcttcatcaccgtgcttcagtatggaagaccacagttctcctggctggtttatggtatcaagatgctgattatgtggctgctctggcccatcgtgctggcactcaccatcttcaacgcctattccgagtaccaggtatcccggtacgtgatgtttgggttttcagtggcgggagcggttgtcacttttgccctgtggatgatgtactttgtgcgcagtatacagctctacaggaggaccaaatcttggtggtcatttaaccctgagacgaacgctatcctctgcgtgaatgcccttggcaggtcctacgttctccccctggacggtacacccactggagtcacactgactttgctctccggcaacttgtatgcagaaggcttcaaaatggcaggcggcctcaccatagagcacttaccgaaatatgtcatgattgccacacctagcaggacaattgtctacaccttagtgggtaagcagctgaaggccacgacagctacaggctgggcctactatgtgaaatccaaagctggagactacagcactgaggcgcggactgacaacctatctgaacatgagaagctgctgcacatggtggctactaacttcagcctgctgaagcaggctggagacgtggaggagaaccctggacctatggccacccaaggacagagagtaaactggggcgatgaaccatccaaacggaggggccggtccaatagtcgaggccgcaagaacaatgatattccgctgagcttctacaaccccataacattggaatcaggaagcaagttttggaacgtctgtcccagagattttgtcccaaagggcattggcaacaaggaccagcaaattggctactggaataggcaggagagataccgcatcgtgaaggggcaaagaaaggaactgccagagcgctggttcttctatttccttggtacgggcccacatgctgatgccaaattcaaggataagatcgacggcgtgttctgggttgcacgggatggagctatgaacaaacctaccacactggggacaaggggcaccaacaatgagtccaagcctctgaagtttgatgggaaaattcctccccagttccagctggaggtcaaccgaagcaggaataattccagatctgggtcccaatcacgatctgtaagtaggaaccgctctcaatcacgggggcggcagcagagcaacaaccagaacaataatgtggaggatacaattgttgcagtcctgcagaagctaggagtaacagataaacaacgttcccgctcaaagtccagggaccggtcggattctaagagccgagacactacccccaagaatgcaaataaacacacctggaagaaaactgcaggcaagggtgatgtcactaacttctatggagcccgtagtgcctctgccaatttcggggactcagacctggtggctaatggaaatgctgctaagtgctaccctcagattgctgaatgtgtgcctagtgttagctcgatgctgttcggatcgcagtggagcgcagaggaggcaggggatcaagtgaaagtaactctgactcatacttactatctgcccaaagatgatgctaagacctcccaattcctggagcagatcgatgcatacaagcgaccttctcaagtcgctaaagatcagcgacagaggaaatctcgctccaagtcagctgacaagaagccagaagaactgagcgtgactctagttgaggcctatactgatgtctttgatgacacccaggtggagatgattgatgaggtgaccaactgataacgtacggctggagcctcggtggcctagcttcttgccccttgggcctccccccagcccctcctccccttcctgcacccgtacccccgtggtctttgaataaagtctgagtgggcggcaaaaaaaaaaaaaaaaaaaaaaaaaaaaaagcatatgactaaaaaaaaaaaaaaaaaaaaaaaaaaaaaaaaaaaaaaaaaaaaaaaaaaaaaaaaaaaaaaaaaaaaaaaaaagaagagcaagctt

SEQ ID NO: 649 - protein, 15 aa, synthetic construct
  REGION 1..15: note = Description of sequence: T-cell epitope: ARV-HSV-mRNA-3
VYADRLDNRLQLGML

We claim:

1. A composition comprising:
a nucleic acid sequence encoding an infection agent antigenic polypeptide, and
a nucleic acid sequence encoding at least one universal T-cell epitope.

2. A composition comprising:
a nucleic acid sequence encoding an infection agent antigenic polypeptide and at least one universal T-cell epitope.

3. The composition of any one of claims 1-2, wherein the at least one universal T-cell epitope is as set forth in Tables 1-5.

4. The composition of any one of claims 1-3, wherein the infection agent is a virus.

5. The composition of claim 4, wherein the virus is a human Metapneumovirus (hMPV), parainfluenza viruses (PIV), respiratory syncytial virus (RSV), measles virus (MeV), influenza virus, herpes simplex virus 1 (HSV1), herpes simplex virus 2 (HSV2), poxvirus, feline coronavirus (FCoV) or a coronavirus, or any combination thereof.

6. The composition of any one of claims 1-5, wherein the nucleic acid sequence encodes at least one human Metapneumovirus (hMPV) antigenic polypeptide, parainfluenza viruses (PIV) antigenic polypeptide, respiratory syncytial virus (RSV) antigenic polypeptide, measles virus (MeV) antigenic polypeptide, influenza virus antigenic polypeptide, herpes simplex virus 1 (HSV1) antigenic polypeptide, herpes simplex virus 2 (HSV2) antigenic polypeptide, poxvirus antigenic polypeptide, feline coronavirus (FCOV) antigenic polypeptide, or a coronavirus antigenic polypeptide, or any combination thereof.

7. The composition of any one of claims 1-5, wherein the nucleic acid sequence encodes at least one human Metapneumovirus (hMPV) antigenic polypeptide, parainfluenza viruses (PIV) antigenic polypeptide, respiratory syncytial virus (RSV) antigenic polypeptide, measles virus (MeV) antigenic polypeptide, influenza virus antigenic polypeptide, poxvirus antigenic polypeptide, feline coronavirus (FCOV) antigenic polypeptide, or a coronavirus antigenic polypeptide, or any combination thereof.

8. The composition of any one of claims 5-7, wherein the coronavirus is a human coronavirus.

9. The composition of any one of claims 5-7, wherein the coronavirus is selected from HCoV-229E, HCoV-OC43, HCoV-HKU1, HCOV-NL, HCOV-NH, HCoV-NL63, SARS-COV, SARS-COV-2, and MERS-COV.

10. The composition of any one of claims 5-8, wherein the coronavirus is SARS-COV-2.

11. The composition of any one of claims 5-7, wherein the poxvirus is monkeypox.

12. The composition of any one of claims 1-5, wherein the nucleic acid sequence encodes at least one human Metapneumovirus (hMPV) antigenic polypeptide, parainfluenza viruses (PIV) antigenic polypeptide, respiratory syncytial virus (RSV) antigenic polypeptide, measles virus (MeV) antigenic polypeptide, influenza virus antigenic polypeptide, herpes simplex virus 1 (HSV1) antigenic polypeptide, herpes simplex virus 2 (HSV2) antigenic polypeptide, poxvirus antigenic polypeptide, feline coronavirus (FCOV) antigenic polypeptide, or any combination thereof.

13. A composition comprising:
a nucleic acid sequence encoding a feline coronavirus (FCOV) antigenic polypeptide, and
a nucleic acid sequence encoding at least one universal T-cell epitope.

14. A composition comprising:
a nucleic acid sequence encoding a feline coronavirus (FCoV) antigenic polypeptide and at least one universal T-cell epitope.

15. A composition comprising:
a nucleic acid sequence encoding a coronavirus antigenic polypeptide, and
a nucleic acid sequence encoding at least one universal T-cell epitope.

16. A composition comprising:
a nucleic acid sequence encoding a coronavirus antigenic polypeptide and at least one universal T-cell epitope.

17. A composition comprising:
a nucleic acid sequence encoding a herpes simplex virus (HSV-1 and/or HSV-2) antigenic polypeptide, and
a nucleic acid sequence encoding at least one universal T-cell epitope.

18. A composition comprising:
a nucleic acid sequence encoding a herpes simplex virus (HSV-1 and/or HSV-2) antigenic polypeptide and at least one universal T-cell epitope.

19. The composition of any one of claims 13-18, wherein the at least one universal T-cell epitope is as set forth in Tables 1-5.

20. The composition of any one of claims 1-19, wherein the nucleic acid sequence encoding the infection agent antigenic polypeptide elicits an antibody response in a subject.

21. The composition of any one of claims 1-20, wherein the nucleic acid sequence encoding the infection agent antigenic polypeptide elicits a broad T-cell response in a subject.

22. The composition of any one of claims 1-21, wherein the nucleic acid sequence encoding the infection agent antigenic polypeptide elicits both an antibody response and a T-cell response in a subject.

23. The composition of any one of claims 1-22, wherein the nucleic acid sequence is a DNA, RNA, any combination thereof (e.g., plasmid DNA, minicircle DNA, minimalistic, immunologically defined gene expression (MIDGE) and Doggybone, messenger RNA (mRNA), circle (cirRNA), self-amplifying-RNA (saRNA, also refer as SAM), or DNA launched SAM (DLSAM)).

24. A nanoparticle comprising:
a nucleic acid sequence encoding an infection agent antigenic polypeptide, and
a nucleic acid sequence encoding at least one universal T-cell epitope.

25. A nanoparticle comprising:
a nucleic acid sequence encoding an infection agent antigenic polypeptide and at least one universal T-cell epitope.

26. The nanoparticle of any one of claims 24-25, wherein the at least one universal T-cell epitope is as set forth in Tables 1-5.

27. The nanoparticle of any one of claims 24-26, wherein the infection agent is a virus.

28. The nanoparticle of claim 27, wherein the virus is a human Metapneumovirus (hMPV), parainfluenza viruses (PIV), respiratory syncytial virus (RSV), measles virus (MeV), influenza virus, herpes simplex virus 1 (HSV1), herpes simplex virus 2 (HSV2), poxvirus, feline coronavirus (FCoV) or a coronavirus, or any combination thereof.

29. The nanoparticle of any one of claims 24-28, wherein the mRNA encodes at least one human Metapneumovirus (hMPV) antigenic polypeptide, parainfluenza viruses (PIV) antigenic polypeptide, respiratory syncytial virus (RSV) antigenic polypeptide, measles virus (MeV) antigenic polypeptide, influenza virus antigenic polypeptide, herpes simplex virus 1 (HSV1) antigenic polypeptide, herpes simplex virus 2 (HSV2) antigenic polypeptide, poxvirus antigenic polypeptide, feline coronavirus (FCOV) antigenic polypeptide, or a coronavirus antigenic polypeptide, or any combination thereof.

30. The nanoparticle of any one of claims 24-28, wherein the nucleic acid sequence encodes at least one human Metapneumovirus (hMPV) antigenic polypeptide, parainfluenza viruses (PIV) antigenic polypeptide, respiratory syncytial virus (RSV) antigenic polypeptide, measles virus (MeV) antigenic polypeptide, influenza virus antigenic polypeptide, poxvirus antigenic polypeptide, feline coronavirus (FCOV) antigenic polypeptide, or a coronavirus antigenic polypeptide, or any combination thereof.

31. The nanoparticle of any one of claims 28-30, wherein the coronavirus is a human coronavirus.

32. The nanoparticle of any one of claims 28-31, wherein the coronavirus is selected from HCoV-229E, HcoV-OC43, HcoV-HKU1, HcoV-NL, HcoV-NH, HcoV-NL63, SARS-CoV, SARS-COV-2, and MERS-COV.

33. The nanoparticle of any one of claims 28-32, wherein the coronavirus is SARS-COV-2.

34. The nanoparticle of any one of claims 28-30, wherein the poxvirus is monkeypox.

35. The nanoparticle of any one of claims 24-27, wherein the nucleic acid sequence encodes at least one human Metapneumovirus (hMPV) antigenic polypeptide, parainfluenza viruses (PIV) antigenic polypeptide, respiratory syncytial virus (RSV) antigenic polypeptide, measles virus (MeV) antigenic polypeptide, influenza virus antigenic polypeptide, herpes simplex virus 1 (HSV1) antigenic polypeptide, herpes simplex virus 2 (HSV2) antigenic polypeptide, poxvirus antigenic polypeptide, feline coronavirus (FCOV) antigenic polypeptide, or any combination thereof.

36. A nanoparticle comprising:
a nucleic acid sequence encoding a feline coronavirus (FCOV) antigenic polypeptide, and
a nucleic acid sequence encoding at least one universal T-cell epitope.

37. A nanoparticle comprising:
a nucleic acid sequence encoding a feline coronavirus (FCOV) antigenic polypeptide and at least one universal T-cell epitope.

38. A nanoparticle comprising:
a nucleic acid sequence encoding a coronavirus antigenic polypeptide, and
a nucleic acid sequence encoding at least one universal T-cell epitope.

39. A nanoparticle comprising:
a nucleic acid sequence encoding a coronavirus antigenic polypeptide and at least one universal T-cell epitope.

40. A nanoparticle comprising:
a nucleic acid sequence encoding a herpes simplex virus (HSV-1 and/or HSV-2) antigenic polypeptide, and
a nucleic acid sequence encoding at least one universal T-cell epitope.

41. A nanoparticle comprising:
a nucleic acid sequence encoding a herpes simplex virus (HSV-1 and/or HSV-2) antigenic polypeptide and at least one universal T-cell epitope.

42. The nanoparticle of any one of claims 36-41, wherein the at least one universal T-cell epitope is as set forth in Tables 1-5.

43. The nanoparticle of any one of claims 24-42, wherein the nucleic acid sequence encoding the infection agent antigenic polypeptide elicits an antibody response in a subject.

44. The nanoparticle of any one of claims 24-43, wherein the nucleic acid sequence encoding the infection agent antigenic polypeptide elicits a T-cell response in a subject.

45. The nanoparticle of any one of claims 24-44, wherein the nucleic acid sequence encoding the infection agent antigenic polypeptide elicits both an antibody response and a T-cell response in a subject.

46. The nanoparticle of any one of claims 24-45, wherein the nucleic acid sequence is DNA, RNA, any combination thereof (e.g., plasmid DNA, minicircle DNA, minimalistic, immunologically defined gene expression (MIDGE) and Doggybone, messenger RNA (mRNA), circle (cirRNA), self-amplifying-RNA (saRNA, also refer as SAM), or DNA launched SAM (DLSAM)).

47. A vaccine comprising:
a nucleic acid sequence encoding an infection agent antigenic polypeptide, and
a nucleic acid sequence encoding at least one universal T-cell epitope.

48. A vaccine comprising:
a nucleic acid sequence encoding an infection agent antigenic polypeptide and at least one universal T-cell epitope.

49. The vaccine of any one of claims 47-48, wherein the at least one universal T-cell epitope is as set forth in Tables 1-5.

50. The vaccine of any one of claims 47-48, wherein the infection agent is a virus.

51. The vaccine of claim 50, wherein the virus is a human Metapneumovirus (hMPV), parainfluenza viruses (PIV), respiratory syncytial virus (RSV), measles virus (MeV), influenza virus, herpes simplex virus 1 (HSV1), herpes simplex virus 2 (HSV2), poxvirus, feline coronavirus (FCoV) or a coronavirus, or any combination thereof.

52. The vaccine of any one of claims 47-50, wherein the nucleic acid sequence encodes at least one human Metapneumovirus (hMPV) antigenic polypeptide, parainfluenza viruses (PIV) antigenic polypeptide, respiratory syncytial virus (RSV) antigenic polypeptide, measles virus (MeV) antigenic polypeptide, influenza virus antigenic polypeptide, herpes simplex virus 1 (HSV1) antigenic polypeptide, herpes simplex virus 2 (HSV2) antigenic polypeptide, poxvirus antigenic polypeptide, feline coronavirus (FCOV) antigenic polypeptide, or a coronavirus antigenic polypeptide, or any combination thereof.

53. The vaccine of any one of claims 47-50, wherein the nucleic acid sequence encodes at least one human Metapneumovirus (hMPV) antigenic polypeptide, parainfluenza viruses (PIV) antigenic polypeptide, respiratory syncytial virus (RSV) antigenic polypeptide, measles virus (MeV) antigenic polypeptide, influenza virus antigenic polypeptide, poxvirus antigenic polypeptide, feline coronavirus (FCoV) antigenic polypeptide, or a coronavirus antigenic polypeptide, or any combination thereof.

54. The vaccine of any one of claims 51-53, wherein the coronavirus is a human coronavirus.

55. The vaccine of any one of claims 51-54, wherein the coronavirus is selected from HCoV-229E, HCoV-OC43, HCoV-HKU1, HCOV-NL, HCOV-NH, HCOV-NL63, SARS-COV, SARS-COV-2, and MERS-COV.

56. The vaccine of any one of claims 51-55, wherein the coronavirus is SARS-COV-2.

57. The vaccine of any one of claims 51-53, wherein the poxvirus is monkeypox.

58. The vaccine of any one of claims 47-50, wherein the nucleic acid sequence encodes at least one human Metapneumovirus (hMPV) antigenic polypeptide, parainfluenza viruses (PIV) antigenic polypeptide, respiratory syncytial virus (RSV) antigenic polypeptide, measles virus (MeV) antigenic polypeptide, influenza virus antigenic polypeptide, herpes simplex virus 1 (HSV1) antigenic polypeptide, herpes simplex virus 2 (HSV2) antigenic polypeptide, poxvirus antigenic polypeptide, feline coronavirus (FCOV) antigenic polypeptide, or any combination thereof.

59. A vaccine comprising:
a nucleic acid sequence encoding a feline coronavirus (FCOV) antigenic polypeptide, and
a nucleic acid sequence encoding at least one universal T-cell epitope.

60. A vaccine comprising:
a nucleic acid sequence encoding a feline coronavirus (FCOV) antigenic polypeptide and
at least one universal T-cell epitope.

61. A vaccine comprising:
a nucleic acid sequence encoding a coronavirus antigenic polypeptide, and
a nucleic acid sequence encoding at least one universal T-cell epitope.

62. A vaccine comprising:
a nucleic acid sequence encoding a coronavirus antigenic polypeptide and at least one universal T-cell epitope.

63. A vaccine comprising:
a nucleic acid sequence encoding a herpes simplex virus (HSV-1 and/or HSV-2) antigenic polypeptide, and
a nucleic acid sequence encoding at least one universal T-cell epitope.

64. A vaccine comprising:
a nucleic acid sequence encoding a herpes simplex virus (HSV-1 and/or HSV-2) antigenic polypeptide and at least one universal T-cell epitope.

65. The vaccine of any one of claims 59-64, wherein the at least one universal T-cell epitope is as set forth in Tables 1-5.

66. The vaccine of any one of claims 47-65, wherein the nucleic acid sequence encoding the infection agent antigenic polypeptide elicits an antibody response in a subject.

67. The vaccine of any one of claims 47-66, wherein the nucleic acid sequence encoding the infection agent antigenic polypeptide elicits a T-cell response in a subject.

68. The vaccine of any one of claims 47-67, wherein the nucleic acid sequence encoding the infection agent antigenic polypeptide elicits both an antibody response and a T-cell response in a subject.

69. The vaccine of any one of claims 47-68, wherein the nucleic acid sequence is a DNA, RNA, any combination thereof (e.g., plasmid DNA, minicircle DNA, minimalistic, immunologically defined gene expression (MIDGE) and Doggybone, messenger RNA (mRNA), circle (cirRNA), self-amplifying-RNA (saRNA, also refer as SAM), or DNA launched SAM (DLSAM)).

70. The vaccine of any one of claims 47-69, wherein the universal T-cell epitope provides broader protection against infection agent variants.

71. A method of treating, inhibiting, reducing, ameliorating, and/or preventing an infection caused by an infection agent in a subject comprising administering to the subject a composition of any one of claims 1-23, a nanoparticle of any one of claims 24-46, or vaccine of any one of claims 47-70.

72. A method of activating T cells, B cells, or any combination thereof comprising contacting a T cells, B cells, or any combination thereof with a composition of any one of claims 1-23, a nanoparticle of any one of claims 24-46, or vaccine of any one of claims 47-70.

73. A method of stimulating the proliferation of T cells, B cells, or any combination comprising contacting a T cells, B cells, or any combination thereof with a composition of any one of claims 1-23, a nanoparticle of any one of claims 24-46, or vaccine of any one of claims 47-70.

74. A method of eliciting an immune response in a subject to an infection agent comprising administering to the subject a composition of any one of claims 1-23, a nanoparticle of any one of claims 24-46, or vaccine of any one of claims 47-70.

75. The method of claim 74, wherein the immune response comprises a cellular immune response, humoral immune response, or any combination thereof.

76. A method of enhancing an immune response generated by a nucleic acid vaccine, the method comprising:
introducing a nucleic acid sequence encoding at least one universal T-cell epitope into the nucleic acid vaccine.

77. A method of enhancing an immune response generated by a nucleic acid vaccine, the method comprising:
introducing a nucleic acid sequence encoding at least one universal T-cell epitope as set forth in Tables 1-5 into the nucleic acid vaccine.

78. The method of claim 77, wherein introduction of the nucleic acid sequence encoding at least one universal T-cell epitope broadens immune response against an infection agent variant.

79. The method of any one of claims 76-78, wherein the nucleic acid sequence is a DNA, RNA, any combination thereof (e.g., plasmid DNA, minicircle DNA, minimalistic, immunologically defined gene expression (MIDGE) and Doggybone, messenger RNA (mRNA), circle (cirRNA), self-amplifying-RNA (saRNA, also refer as SAM), or DNA launched SAM (DLSAM)).

80. The method of any one of claims 71-79, wherein the infection agent is a virus.

81. The method of claim 80, wherein the virus comprises a human Metapneumovirus (hMPV), parainfluenza viruses (PIV), respiratory syncytial virus (RSV), measles virus (MeV), influenza virus, herpes simplex virus 1 (HSV1), herpes simplex virus 2 (HSV2), poxvirus, feline coronavirus (FCoV) or a coronavirus, or any combination thereof.

82. The method of any one of claims 71-81, wherein the mRNA encodes at least one human Metapneumovirus (hMPV) antigenic polypeptide, parainfluenza viruses (PIV) antigenic polypeptide, respiratory syncytial virus (RSV) antigenic polypeptide, measles virus (MeV) antigenic polypeptide, influenza virus antigenic polypeptide, herpes simplex virus 1 (HSV1) antigenic polypeptide, herpes simplex virus 2 (HSV2) antigenic polypeptide, poxvirus antigenic polypeptide, feline coronavirus (FCOV) antigenic polypeptide, or a coronavirus antigenic polypeptide, or any combination thereof.

83. The method of any one of claims 71-81, wherein the nucleic acid sequence encodes at least one human Metapneumovirus (hMPV) antigenic polypeptide, parainfluenza viruses (PIV) antigenic polypeptide, respiratory syncytial virus (RSV) antigenic polypeptide, measles virus (MeV) antigenic polypeptide, influenza virus antigenic polypeptide, poxvirus antigenic polypeptide, feline coronavirus (FCOV) antigenic polypeptide, or a coronavirus antigenic polypeptide, or any combination thereof.

84. The method of any one of claims 81-83, wherein the coronavirus is a human coronavirus.

85. The method of any one of claims 81-84, wherein the coronavirus is selected from HCoV-229E, HCoV-OC43, HCoV-HKU1, HCOV-NL, HCOV-NH, HCOV-NL63, SARS-COV, SARS-COV-2, and MERS-COV.

86. The method of any one of claims 81-85, wherein the coronavirus is SARS-COV-2.

87. The method of any one of claims 81-83, wherein the poxvirus is monkeypox.

88. The method of any one of claims 71-81, wherein the nucleic acid sequence encodes at least one human Metapneumovirus (hMPV) antigenic polypeptide, parainfluenza viruses (PIV) antigenic polypeptide, respiratory syncytial virus (RSV) antigenic polypeptide, measles virus (MeV) antigenic polypeptide, influenza virus antigenic polypeptide, herpes simplex virus 1 (HSV1) antigenic polypeptide, herpes simplex virus 2 (HSV2) antigenic polypeptide, poxvirus antigenic polypeptide, feline coronavirus (FCOV) antigenic polypeptide, or any combination thereof.
